(19) United States
(12) Patent Application Publication
(10) Pub. No.: US 2022/0154258 A1
(43) Pub. Date: May 19, 2022

(54) CRISPR EFFECTOR SYSTEM BASED MULTIPLEX DIAGNOSTICS

(71) Applicants: THE BROAD INSTITUTE, INC., Cambridge, MA (US); MASSACHUSETTS INSTITUTE OF TECHNOLOGY, Cambridge, MA (US); PRESIDENT AND FELLOWS OF HARVARD COLLEGE, Cambridge, MA (US)

(72) Inventors: Jonathan Gootenberg, Cambridge, MA (US); Omar Abudayyeh, Cambridge, MA (US); Feng Zhang, Cambridge, MA (US)

(73) Assignees: THE BROAD INSTITUTE, INC., Cambridge, MA (US); MASSACHUSETTS INSTITUTE OF TECHNOLOGY, Cambridge, MA (US); PRESIDENT AND FELLOWS OF HARVARD COLLEGE, Cambridge, MA (US)

(21) Appl. No.: 17/439,063

(22) PCT Filed: Mar. 13, 2020
(86) PCT No.: PCT/US2020/022795

§ 371 Date: Sep. 14, 2021

Related U.S. Application Data
(60) Provisional application No. 62/818,702, filed on Mar. 14, 2019.
(60) Provisional application No. 62/890,555, filed on Aug. 22, 2019.

(51) Int. Cl. C12Q 1/6825; B01L 3/00; C12N 9/22; C12N 15/11; G16B 40/20; G16B 20/30; C12N 9/14; G01N 21/64

(52) U.S. Cl. CPC C12Q 1/6825; G01N 2021/6439; C12N 9/22; C12N 15/11; G16B 40/20; G16B 20/30; C12N 9/14; C12Y 306/04012; G01N 21/6428; C12N 2310/20; C12N 2800/80; B01L 2300/0825; C12N 2320/11; C12N 2330/31; G01N 2021/6432; B01L 3/5023

(57) ABSTRACT

Systems and methods for rapid diagnostics related to the use of CRISPR effector systems and optimized guide sequences, including multiplex lateral flow diagnostic devices and methods of use, are provided.

### CROSS-REFERENCE TO RELATED APPLICATIONS

[0001] This application claims the benefit of U.S. Provisional Application No. 62/818,702 filed Mar. 14, 2019 and U.S. Provisional Application 62/890,555 filed Aug. 22, 2019. The entire contents of the above-identified applications are fully incorporated herein by reference.

### STATEMENT REGARDING FEDERALLY SPONSORED RESEARCH

[0002] This invention was made with government support under grant numbers MH110049 HL141201, HG009761 and CA210382 awarded by the National Institutes of Health. The government has certain rights in the invention.

### REFERENCE TO AN ELECTRONIC SEQUENCE LISTING

[0003] The contents of the electronic sequence listing (BROD-3980WP_ST25.txt”; Size is 709,752 bytes and it was created on Mar. 13, 2020) is herein incorporated by reference in its entirety.

### TECHNICAL FIELD

[0004] The subject matter disclosed herein is generally directed to rapid diagnostics related to the use of CRISPR effector systems.

### BACKGROUND

[0005] Nucleic acids are a universal signature of biological information. The ability to rapidly detect nucleic acids with high sensitivity and single-base specificity on a portable platform has the potential to revolutionize diagnosis and monitoring for many diseases, provide valuable epidemiological information, and serve as a generalizable scientific tool. Although many methods have been developed for detecting nucleic acids (Du et al., 2017; Green et al., 2014; Kumar et al., 2014; Pardee et al., 2014; Pardee et al., 2016; Urdea et al., 2006), they inevitably suffer from trade-offs among sensitivity, specificity, simplicity, and speed. For example, qPCR approaches are sensitive but are expensive and rely on complex instrumentation, limiting usability to highly trained operators in laboratory settings. Other approaches, such as new methods combining isothermal nucleic acid amplification with portable platforms (Du et al., 2017; Pardee et al., 2016), offer high detection specificity in a point-of-care (POC) setting, but have somewhat limited applications due to low sensitivity. As nucleic acid diagnostics become increasingly relevant for a variety of healthcare applications, detection technologies that provide high specificity and sensitivity at low cost would be of great utility in both clinical and basic research settings.

[0006] Sensitive and rapid detection of nucleic acids is important for clinical diagnostics and biotechnological applications. Previously, Applicants developed a platform for nucleic acid detection using CRISPR enzymes called SHERLOCK (Specific High Sensitivity Enzymatic Reporter unLOCKing)(Gootenberg, 2018; Gootenberg, 2017), which combines pre-amplification with the RNA-guided RNase CRISPR-Cas13 (Abudayyeh, 2016; East-Seletsky, 2016; Shmakov, 2015; Smargon, 201; Shmakov, 2017) and DNase CRISPR-Cas12 (Zetsche, 2015 599; Chen, 2018) for sensing of nucleic acids via fluorescence or portable lateral flow. Here, Applicants extend this platform by applying machine learning to predict strongly active crRNAs for rapid detection of nucleic acid targets in an optimized one-pot reaction with lateral flow readout. Applicants further develop novel lateral flow strips for multiplexed detection of two or three targets per strip. The combination of predictive guide design tools with a one-pot SHERLOCK format and multiplexed lateral flow detection allows for rapid deployment of robust and portable SHERLOCK assays in the laboratory, clinic, and field.

[0007] The SHERLOCK platform is a low-cost CRISPR-based diagnostic that enables single-molecule detection of DNA or RNA with single-nucleotide specificity (Gootenberg, 2018; Gootenberg, 2017; Myhrvold, 2018). Nucleic acid detection with SHERLOCK relies on the collateral activity of Cas13 and Cas12, which unleashes promiscuous cleavage of reporters upon target detection (Abudayyeh, 2016; East-Seletsky, 2016)(Smargon, 2017). SHERLOCK is capable of single-molecule detection in less than an hour and can be used for multiplexed target detection when using CRISPR enzymes with orthogonal cleavage preference, such as Cas13a from Leptotrichia wadei (LwaCas13a), Cas13b from Capnocytophaga canimorsus Cc5 (CcaCas13b), and Cas12a from Acidaminococcus sp. BV3L6 (AsCas12a)(Gootenberg, 2018; Myhrvold, 2018; Gootenberg, 2017; Chen, 2018; Li, 2018; Li, 2018). While these enzymes have been widely used for both in vivo and in vitro applications (Konermann, 2018; Gootenberg, 2018; Gootenberg, 2017; Abudayyeh, 2017; Cox, 2017; Myhrvold, 2018; Chen, 2018; Li, 2018; Li, 2018)(Zhao, 2018), a major limitation to widespread adoption is the lack of predictive Cas13 guide design tools to help users in designing experiments or assays.

[0008] The development of data-driven models for aiding experimental design has featured prominently during the maturation of molecular tools. Software for choosing optimal primer or probe sequences is vital for amplification and molecular detection technologies as well as CRISPR-based methods. Genome-informed thermodynamic models for primer selection (Ye, 2012), computational probe design for nucleic acid detection (Kim, 2015), and machine learning models for CRISPR off-target (Hsu, 2013) and on-target (Doench, 2014) prediction have all broadened use of corresponding technologies. An accurate model for activity-based Cas13 guide selection would facilitate design of optimal SHERLOCK assays, especially in applications requiring high-activity guides like lateral flow detection, and enable guide RNA design for in vivo RNA targeting applications with Cas13.

### SUMMARY

[0009] In certain example embodiments, a lateral flow device is provided comprising a substrate comprising a first end and a second end, the first end comprising a sample loading portion, a first region comprising a detectable ligand, two or more CRISPR effector systems, two or more detection constructs, and one or more first capture regions, each comprising a first binding agent; and the substrate comprising two or more second capture regions between the first region of the first end and the second end, each second capture region comprising a different binding agent; wherein each of the two or more CRISPR effector systems comprises a CRISPR effector protein or polynucleotide encoding a CRISPR effector protein and one or more guide sequences, each guide sequence configured to bind one or more target molecules.

[0010] In embodiments, the first end comprises two detection constructs, wherein each of the two detection constructs comprises an RNA or DNA oligonucleotide, comprising a first molecule on a first end and a second molecule on a second end. In certain embodiments, the first molecule on the first end of the first detection construct is FAM and the second molecule on the second end of the first detection construct is biotin or vice versa; and the first molecule on the first end of the second detection construct is FAM and the second molecule on the second end of the second detection construct is Digoxigenin (DIG) or vice versa. In embodiments, the first end comprises three detection constructs, wherein each of the three detection constructs comprises an RNA or DNA oligonucleotide, comprising a first molecule on a first end and a second molecule on a second end. In certain embodiments, the first and second molecules on the detection constructs comprise Tye 665 and Alexa 488; Tye 665 and FAM; and Tye 665 and Digoxigenin (DIG).

[0011] In embodiments, the CRISPR effector protein is an RNA-targeting effector protein, in some instances, the RNA-targeting effector protein is C2c2, Cas13b, or Cas13a. In some embodiments, the system comprises a polynucleotide encoding a CRISPR effector protein and the one or more guide RNAS are provided as a multiplexing polynucleotide, the multiplexing polynucleotide configured to comprise two or more guide sequences.

[0012] Methods for detecting a target nucleic acid in a sample are provided, comprising contacting a sample with the first end of a lateral flow device disclosed herein. In embodiments, the lateral flow device comprises the sample loading portion, wherein the sample flows from the sample loading portion of the substrate towards the first and second capture regions and generates a detectable signal. In preferred embodiments, the lateral flow device is capable of detecting two different target nucleic acid sequences. In particular embodiments, when the target nucleic acid sequences are absent from the sample, a fluorescent signal is generated at each capture region. In embodiments, the detectable signal is a loss of fluorescence that appears at the first and second capture regions. In embodiments, the lateral flow device is capable of detecting three different target nucleic acid sequences. In embodiments, the lateral flow device comprises three capture regions wherein the fluorescent signal appears at the first, second, and third capture regions. In embodiments, when the sample contains one or more target nucleic acid sequences, a fluorescent signal is absent at the capture region for the corresponding target nucleic acid sequence.

[0013] Nucleic acid detection systems comprising two or more CRISPR systems are provided, each CRISPR system comprising an effector protein and a guide RNA designed to bind to a corresponding target molecule; a set of detection constructs, each detection construct comprising a cutting motif sequence that is preferentially cut by one of the activated CRISPR effector proteins; and reagents for helicase dependent nucleic acid amplification (HDA). In embodiments, the HDA reagents comprise a helicase super mutant, selected from WP_003870487.1 Thermoanaerobacter ethanolicus comprising mutations D403A/D404, WP_049660019.1 Bacillus sp. FJAT-27231 comprising mutations D407A/D408A, WP_034654680.1 Bacillus megaterium comprising mutations D415A/D416A, WP_095390358.1, Bacillus simplex comprising mutations D407A/D408A, and WP_055343022.1 Paeniclostridium sordellii comprising mutations D402A/D403A. In embodiments, the systems provide methods for quantifying target nucleic acids in samples comprising distributing a sample or set of samples into one or more individual discrete volumes comprising two or more CRISPR systems, amplifying one or more target molecules in the sample or set of samples by HDA; incubating the sample or set of samples under conditions sufficient to allow binding of the guide RNAs to one or more target molecules; activating the CRISPR effector protein via binding of the guide RNAs to the one or more target molecules, wherein activating the CRISPR effector protein results in modification of the detection construct such that a detectable positive signal is generated; detecting the one or more detectable positive signal, wherein detection of the one or more detectable positive signal indicates a presence of one or more target molecules in the sample; and comparing the intensity of the one or more signals to a control to quantify the nucleic acid in the sample; wherein the steps of amplifying, incubating, activating, and detecting are all performed in the same individual discrete volume. In embodiments, the detectable positive signal is a loss of fluorescent signal. In embodiments, the detectable positive signal is detected on a lateral flow device.

[0014] Methods for designing guide RNAs for use in the detection systems disclosed herein are provided, comprising the steps of designing putative guide RNAs tiled across a target molecule of interest; incubating putative guide RNAs with a Cas effector protein and the target molecule and measuring cleavage activity of the each putative guide RNA; creating a training model based on the cleavage activity results of incubating the putative guide RNAs with the Cas effector protein and the target molecule; predicting highly active guide RNAs for the target molecule, wherein the predicting comprises optimizing the nucleotide at each base position in the guide RNA based on the training model; and validating the predicted highly active guide RNAs by incubating the guide RNAs with the Cas effector protein and the target molecule. In embodiments, the training model comprises one or more input features selected from guide sequence, flanking target sequence, normalized positions of the guide in the target and guide GC content. In an aspect, the guide sequence and/or flanking sequence input comprises one hit encoding mono-nucleotide and/or dinucleotide based identities across a guide length and flanking sequence in the target. In an aspect, the training model comprises applying logistic regression model on the activity of the guides across the one or more input features.

[0015] In embodiments, the predicting highly active guides for the target molecule comprises selecting guides with an increase in activity of a guide relative to the median activity, or selecting guides with highest guide activity. The increase in activity can be measured by an increase in fluorescence. In one aspect, the guides are selected with a 1.5, 2, 2.5 or 3-fold activity relative to median, or are in the top quartile or quintile for each target tested. In embodiments, the Cas effector protein is a Cas12 or Cas13 protein. In certain embodiments, the Cas protein is a Cas13a or Cas13b protein, in embodiments, the Cas protein is LwaCas13a or CcaCas13b.

[0016] These and other aspects, objects, features, and advantages of the example embodiments will become apparent to those having ordinary skill in the art upon consideration of the following detailed description of illustrated example embodiments.

### BRIEF DESCRIPTION OF THE DRAWINGS

[0017] An understanding of the features and advantages of the present invention will be obtained by reference to the following detailed description that sets forth illustrative embodiments, in which the principles of the invention may be utilized, and the accompanying drawings of which:

[0018] FIGS. 1A-1F—illustrate that one-pot HDA-SHERLOCK is capable of quantitative detection of different targets. (FIG. 1A) Schematic of helicase reporter for screening DNA unwinding activity (SEQ ID NOs: 1-7). (FIG. 1B) Temperature sensitivity screen of different helicase orthologs with and without super-helicase mutations using the high-throughput fluorescent reporter. (FIG. 1C) Schematic of one-pot SHERLOCK with RPA or Super-HDA. (FIG. 1D) Kinetic curves of one-pot RPA detection of a restriction endonuclease gene fragment (Ea175) from T. denticola. (FIG. 1E) Kinetic curves of one-pot HDA detection of Ea175. (FIG. 1F) Quantitative nature of HDA-SHERLOCK compared to one-pot RPA.

[0019] FIGS. 2A-2I—illustrate that one-pot RPA-SHERLOCK is capable of rapid detection of different targets. (FIG. 2A) Kinetic curves of one-pot RPA detection of a restriction endonuclease gene fragment (Ea175) from T. denticola. (FIG. 2B) One-pot RPA end-point detection of Ea175 gene fragment. (FIG. 2C) One-pot RPA lateral flow readout of the Ea175 fragment in 30 minutes. (FIG. 2D) Kinetic curves of one-pot RPA detection of a restriction endonuclease gene fragment (Ea81) from T. denticola. (FIG. 2E) One-pot RPA end-point detection of Ea81 gene fragment. (FIG. 2F) One-pot RPA lateral flow readout of the Ea81 fragment in 3 hours. (FIG. 2G) Kinetic curves of one-pot RPA detection of acyltransferase gene fragment (acyltransferase) from P. aeruginosa. (FIG. 2H) One-pot RPA end-point detection of acyltransferase gene fragment. (FIG. 2I) One-pot RPA lateral flow readout of the acyltransferase fragment in 3 hours.

[0020] FIGS. 3A-3F—Multiplexed lateral flow detection with two-pot SHERLOCK. FIG. 3A Schematic of multiplex lateral flow with RPA preamplification design for two probes. FIG. 3B Multiplexed lateral flow detection with RPA preamplification of two targets, ssDNA 1 and a gene fragment of lectin from soybeans. FIG. 3C Multiplexed lateral flow detection with RPA preamplification of two targets, ssDNA 1 and lectin gene fragment, at a range of concentrations down to 2 aM. FIG. 3D Schematic for custom-made lateral flow strips enabling detection of three targets simultaneously with SHERLOCK. FIG. 3E Images of multiplexed lateral flow strips detecting three targets, ssDNA 1, Zika ssRNA, and Dengue ssRNA, in various combinations using LwaCas13a, CcaCas13b, and AsCas12a. FIG. 3F Quantitation of Tye-665 fluorescent intensity of multiplexed lateral flow strips detecting three targets, ssDNA 1, Zika ssRNA, and Dengue ssRNA, in various combinations using LwaCas13a, CcaCas13b, and AsCas12a.

[0021] FIGS. 4A-4G—SHERLOCK guide design model is capable of predicting highly active crRNAs for SHERLOCK detection. (FIG. 4A) Schematic of computational workflow of the SHERLOCK guide design tool. (FIG. 4B) Collateral activity of LwaCas13a with crRNAs tiling 5 synthetic targets. (FIG. 4C) ROC and AUC results of the best performing logistic regression model trained using the data from part B. (FIG. 4D) Mono-nucleotide feature weights of the best performing logistic regression model. (FIG. 4E) Di-nucleotide feature weights of the best performing logistic regression model. (FIG. 4F) Kinetic data of predicted best and worst performing crRNAs on three targets. (FIG. 4G) Predicted scores of multiple novel guides on three targets compared to guide activity.

[0022] FIGS. 5A-5C—SHERLOCK guide design model is capable of predicting highly active crRNAs for SHERLOCK detection. FIG. 5A Collateral activity of LwaCas13a and CcaCas13b with crRNAs tiling Ebola and Zika synthetic ssRNA targets demonstrates wide variation in guide performance. FIG. 5B ROC and AUC results of the best performing logistic regression model for LwaCas13a and CcaCas13b trained using crRNAs tiled and five different synthetic RNA targets FIGS. 5B and 5C show trained models predict PFS. FIG. 5C Selected mono-nucleotide feature weights of the best performing logistic regression model for LwaCas13a (left) and CcaCas13b (right). Known PFS constraints are shown as letters above the appropriate flanking positions.

[0023] FIGS. 6A-6F SHERLOCK guide design model validates across many crRNAs and can predict crRNAs with high activity on lateral flow strips. FIG. 6A Validation of best performing model for LwaCas13a across multiple crRNA, showing the predicted score of each crRNA versus actual collateral activity upon target recognition of thermonuclease, APML long, or APML short synthetic targets. The best and worst crRNAs predicted by the model are highlighted, and indicates the models predict good guides on novel targets. FIG. 6B Validation of best performing model for CcaCas13b across multiple crRNAs, showing the predicted score of each crRNA versus actual collateral activity upon target recognition of thermonuclease, APML long, or APML short synthetic targets. The best and worst crRNAs predicted by the model are highlighted, respectively. FIG. 6C Kinetic data of predicted best and worst performing LwaCas13a crRNAs highlighted in FIG. 6A on thermonuclease, APML long, and APML short synthetic RNA targets. FIG. 6D Kinetic data of predicted best and worst performing CcaCas13b crRNAs highlighted in FIG. 6B on thermonuclease, APML long, and APML short synthetic RNA targets. FIG. 6E Lateral flow performance of the predicted best and worst LwaCas13a crRNAs from FIG. 6A on detecting thermonuclease, APML long, and APML short synthetic RNA targets. FIG. 6F Lateral flow performance of the predicted best and worst CcaCas13b crRNAs from FIG. 6B on detecting thermonuclease, APML long, and APML short synthetic RNA targets.

[0024] FIG. 7A-7L One-pot RPA-SHERLOCK is capable of rapid and portable detection of different targets FIG. 7A Schematic of one-pot LwaCas13a SHERLOCK detection of acyltransferase target from P. aeruginosa with the top and worst predicted crRNAs from the guide design model. FIG. 7B Kinetic curves of one-pot LwaCas13a SHERLOCK detection of acyltransferase target from P. aeruginosa with the top predicted crRNA. FIG. 7C Kinetic curves of one-pot LwaCas13a SHERLOCK detection of acyltransferase target from P. aeruginosa with the worst predicted crRNA. Together, FIGS. 7B and 7C show the models of the top predicted guide has improved kinetics. FIG. 7D One-pot LwaCas13a SHERLOCK end-point detection of acyltransferase target from P. aeruginosa for the top and worst crRNAs at 1 hour. FIG. 7E One-pot LwaCas13a SHERLOCK lateral flow detection of acyltransferase target from P. aeruginosa using the top and worst predicted crRNAs at 1 hour. FIG. 7F Quantitation of one-pot LwaCas13a SHERLOCK end-point lateral flow detection of acyltransferase target from P. aeruginosa using the top and worst predicted crRNAs at 1 hour. FIG. 7G Schematic CcaCas13b one-pot SHERLOCK detection of thermonuclease target from S. aureus with the top and worst predicted crRNAs from the guide design model. FIG. 7H Kinetic curves of one-pot CcaCas13b SHERLOCK detection of thermonuclease target from S. aureus with the top predicted crRNA. FIG. 7I Kinetic curves of one-pot CcaCas13b SHERLOCK detection of thermonuclease target from S. aureus with the worst predicted crRNA. FIG. 7J One-pot CcaCas13b SHERLOCK end-point detection of thermonuclease target from S. aureus for the top and worst crRNAs at 1 hour. FIG. 7K One-pot CcaCas13b SHERLOCK lateral flow detection of thermonuclease target from S. aureus using the top and worst predicted crRNAs at 1 hour, with top performing guides allowing sensitive detection. FIG. 7L Quantitation of one-pot CcaCas13b SHERLOCK end-point lateral flow detection of thermonuclease target from S. aureus using the top and worst predicted crRNAs at 1 hour.

[0025] FIG. 8A-8D Multiplexed lateral flow detection with SHERLOCK. FIG. 8A Schematic of multiplex detection with one-pot SHERLOCK, with either fluorescent readout or lateral flow format. FIG. 8B Multiplexed fluorescence detection with one-pot SHERLOCK detection of Ea175 and thermonuclease targets using LwaCas13a and CcaCas13b orthologs, respectively, and the top predicted cRNAs. FIG. 8C Schematic of multiplex lateral flow with SHERLOCK. FIG. 8D. Multiplexed lateral flow detection with one-pot SHERLOCK detection of Ea175 and thermonuclease targets using LwaCas13a and CcaCas13b orthologs, respectively, and the top predicted cRNAs.

[0026] FIG. 9A-9C Training data and features of the SHERLOCK guide design model. FIG. 9A Collateral activity of LwaCas13a (blue) and CcaCas13b (red) with crRNAs tiling Ebola and Zika synthetic ssRNA targets. FIG. 9B Mono-nucleotide feature weights of the best performing logistic regression model for LwaCas13a (top) and CcaCas13b (bottom). FIG. 9C Di-nucleotide feature weights of the best performing logistic regression model for LwaCas13a (left) and CcaCas13b (right).

[0027] FIG. 10A-10F Additional targets are easily detected via one-pot SHERLOCK with lateral flow. FIG. 10A Kinetic curves of one-pot LwaCas13a SHERLOCK detection of Ea175 target. FIG. 10B One-pot LwaCas13a SHERLOCK end-point detection of Ea175 target at 45 minutes. FIG. 10C Quantitation of one-pot LwaCas13a SHERLOCK end-point lateral flow detection of Ea175 target at 30 minutes. FIG. 10D Kinetic curves of one-pot LwaCas13a SHERLOCK detection of Ea81 target. FIG. 10E One-pot LwaCas13a SHERLOCK end-point detection of Ea81 target at 45 minutes. FIG. 10F Quantitation of one-pot LwaCas13a SHERLOCK end-point lateral flow detection of Ea81 target at 3 hours.

[0028] FIG. 11A-11D—SHERLOCK guide design model is capable of predicting highly active crRNAs for SHERLOCK detection. FIG. 11A Schematic of computational workflow of the SHERLOCK guide design tool, FIG. 11B Collateral activity of LwaCas13a and CcaCas13b with crRNAs tiling Ebola and Zika synthetic ssRNA targets, FIG. 11C ROC and AUC results of the best performing logistic regression model for LwaCas13a (gray) and CcaCas13b (darker gray) trained using crRNAs tiled and five different synthetic RNA targets, FIG. 11D Selected mono-nucleotide feature weights of the best performing logistic regression model for LwaCas13a (left) and CcaCas13b (right). Known PFS constraints are shown as letters above the appropriate flanking positions.

[0029] FIG. 12—LwaCas13a guide design model predicts highly active guides for in vivo knockdown. A panel of guides (plus symbols) predicted to be highly active or not active, as well as random guides, are tested for knockdown of the Gluc transcript in HEK293FT cells. Each plus symbol represents the mean of three biological replicates. The mean of the distributions are shown as red dotted lines while the quartiles are shown as blue dotted lines.

[0030] FIG. 13A-13E—SHERLOCK guide design machine learning model validates across many crRNAs, can predict crRNAs with high activity on lateral flow strips, and correlates with in vivo knockdown. FIG. 13A Validation of best performing model for LwaCas13a across multiple crRNAs, showing the predicted score of each crRNA versus actual collateral activity upon target recognition of thermonuclease, APML long, or APML short synthetic targets. The best and worst crRNAs predicted by the model are highlighted in blue and red, respectively. FIG. 13B Kinetic data of predicted best and worst performing LwaCas13a crRNAs highlighted in panel 13a on thermonuclease, APML long, and APML short synthetic RNA targets. FIG. 13C Lateral flow performance of the predicted best and worst LwaCas13a crRNAs from panel 13a on detecting thermonuclease, APML long, and APML short synthetic RNA targets. FIG. 13D Schematic for evaluating the predictive performance of the guide design model for in vivo knockdown activity. FIG. 13E Previously measured knockdown activity of LwaCas13a guides tiled across Gluc and KRAS targets¹⁴ was ranked according to the predicted activity of the guide based on the guide design model. The means of the distributions are shown as red dotted lines while the quartiles are shown as blue dotted lines. ***p<0.001; *p<0.05; two-tailed student's T-test.

[0031] FIG. 14A-14E Multiplexed lateral flow detection with SHERLOCK. FIG. 14A Schematic of multiplex detection with one-pot SHERLOCK, with either fluorescent readout or lateral flow format. FIG. 14B Multiplexed fluorescence detection with one-pot SHERLOCK detection of Ea175 and thermonuclease targets using LwaCas13a and CcaCas13b orthologs, respectively, and the best predicted cRNAs; FIG. 14C Schematic of multiplex lateral flow with SHERLOCK; FIG. 14D Representative images of multiplexed lateral flow detection with one-pot SHERLOCK of Ea175 and thermonuclease targets using LwaCas13a and CcaCas13b orthologs, with quantitation of lateral flow strip band intensities. Lateral flow strip band intensities are inverted such that loss of signal is shown as positive signal; FIG. 14E Multiplexed lateral flow detection with one-pot SHERLOCK detection of Ea175 and thermonuclease targets using LwaCas13a and CcaCas13b orthologs, respectively, and the best predicted cRNAs. Lateral flow strip band intensities are inverted such that loss of signal is shown as positive signal.

[0032] FIG. 15A-15F Detection of PML-RARa and BCR-ABL cancer fusion transcripts from clinical samples. FIG. 15A Diagram of guide design for PML-RARa and BCR-ABL fusion transcripts tested in this study using the guide design model. Diagram of fusion transcripts adapted from van Dongen et al²⁸. FIG. 15B Workflow for SHERLOCK testing of clinical samples of patients exhibiting PML-RARa and BCR-ABL fusion transcripts. Patient blood or bone marrow is extracted, pelleted, and RNA is purified from patient cells. Extracted RNA is then used as input into an RT-RPA reaction, the products of which are used as input for Cas13 detection; FIG. 15C RT-PCR of APML and BCR-ABL cancer variants from purified RNA. Composite image is made up of bands cut out from several gels running PCR products for the different transcripts (full gel images shown in FIG. 14A-14E). PCR products for the different fusions should have the following sizes: PML-RARa Intron 6 (214 bp); PML-RARa Intron 3: 289 bp; BCR-ABL p210 e14a2 (360 bp); BCR-ABL p210 e13a2 (285 bp); BCR-ABL p190 e1a2 (381 bp); FIG. 15D Two-step SHERLOCK end-point fluorescence detection of PML-RARa and BCR-ABL fusion transcripts using best predicted crRNAs at 45 minutes. RNA from each patient was amplified using primer sets for the three fusion transcripts shown, and Cas13 detection was setup with corresponding crRNAs. Greyed out bars (sample 15) indicate that data was not collected; FIG. 15E Two-step SHERLOCK lateral flow detection of PML-RARa and BCR-ABL fusion transcripts using best predicted crRNAs at 3 hours. Sample bands were cropped out from the lateral flow strips; full lateral flow images, containing both sample and control bands, are shown in FIG. 15. Greyed out boxes (sample 15) indicate that data was not collected; FIG. 5F Quantitation of the lateral flow data shown in (e). Greyed out bars (sample 15) indicate that data was not collected.

[0033] FIG. 16A-16C Multiplexed detection of PML-RARa and BCR-ABL cancer fusion transcripts from clinical samples FIG. 16A Schematic of two-step SHERLOCK multiplexed detection from RNA input; FIG. 16B Images of multiplexed lateral flow detection with two-step SHERLOCK detection of PML-RARa Intron/Exon 6 and Intron 3 fusion transcripts using LwaCas13a and CcaCas13b orthologs, respectively, and the best predicted cRNAs; FIG. 16C Quantitation of lateral flow strip band intensities; data are inverted such that loss of signal is shown as positive signal.

[0034] FIG. 17A-17C: SHERLOCK guide design machine learning model validates across many crRNAs (CcaCas13b). FIG. 17A. Validation of best performing model for CcaCas13b across multiple crRNAs, showing the predicted score of each crRNA versus actual collateral activity upon target recognition of thermonuclease, APML long, or APML short synthetic targets. The best and worst crRNAs predicted by the model are highlighted in blue or red, respectively. FIG. 17B. Kinetic data of predicted best and worst performing CcaCas13b crRNAs highlighted in panel 17A on thermonuclease, APML long, and APML short synthetic RNA targets. FIG. 17C. Lateral flow performance of the predicted best and worst CcaCas13b crRNAs from panel 17A on detecting thermonuclease, APML long, and APML short synthetic RNA targets.

[0035] FIG. 18A-18D SHERLOCK guide design machine learning model validates for crRNAs targeting BCR-ABL p210 b3a2. FIG. 18A Validation of best performing model for CcaCas13b across crRNAs tiling the BCR-ABL p210 b3a2 fusion transcript, showing the predicted score of each crRNA versus actual collateral activity upon target recognition. The best and worst crRNAs predicted by the model, respectively. FIG. 18B Validation of best performing model for LwaCas13a across crRNAs tiling the BCR-ABL p210 b3a2 fusion transcript, showing the predicted score of each crRNA versus actual collateral activity upon target recognition. The best and worst crRNAs predicted by the model are highlighted, respectively. FIG. 18C Kinetic data of predicted best and worst performing LwaCas13a crRNAs highlighted in 18A on the BCR-ABL p210 b3a2 fusion transcript. FIG. 18D Kinetic data of predicted best and worst performing CcaCas13b crRNAs highlighted in 18B on the BCR-ABL p210 b3a2 fusion transcript.

[0036] FIG. 19A-19E Nested RT-PCR detection of PML-RARa and BCR-ABL cancer fusion transcripts from clinical samples. FIG. 19A Whole gel images of detection of PML-RARa Intron 6: 214 bp. For sample 6, because the breakpoint is in exon 6 of PML, the band size can be variable. FIG. 19B Whole gel images of detection of PML-RARa Intron 3: 289 bp. Some patients that have intron/exon 6 breakpoints, as in samples 4-6, can demonstrate several larger size bands (as seen), due to alternative splicing of PML. FIG. 19C Whole gel images of detection of BCR-ABL p210: e14a2 360 bp, e13a2 285 bp. FIG. 19D Whole gel images of detection of BCR-ABL p190: e1a2 381 bp. FIG. 19E Whole gel images of detection of GAPDH: 138 bp.

[0037] FIG. 20 Detection of PML-RARa and BCR-ABL cancer fusion transcripts from clinical samples. Two-step SHERLOCK lateral flow detection of PML-RARa and BCR-ABL fusion transcripts using best predicted crRNAs at 3 hours. Lateral flow strips are depicted with both the sample and control bands. Greyed out strips (sample 15) indicate that data was not collected.

[0038] The figures herein are for illustrative purposes only and are not necessarily drawn to scale.

### DETAILED DESCRIPTION OF THE EXAMPLE EMBODIMENTS

### General Definitions

[0039] Unless defined otherwise, technical and scientific terms used herein have the same meaning as commonly understood by one of ordinary skill in the art to which this disclosure pertains. Definitions of common terms and techniques in molecular biology may be found in Molecular Cloning: A Laboratory Manual, 2^{nd} edition (1989) (Sambrook, Fritsch, and Maniatis); Molecular Cloning: A Laboratory Manual, 4^{th} edition (2012) (Green and Sambrook); Current Protocols in Molecular Biology (1987) (F. M. Ausubel et al. eds.); the series Methods in Enzymology (Academic Press, Inc.): PCR 2: A Practical Approach (1995) (M. J. MacPherson, B. D. Hames, and G. R. Taylor eds.): Antibodies, A Laboratory Manual (1988) (Harlow and Lane, eds.): Antibodies A Laboratory Manual, 2^{nd} edition 2013 (E. A. Greenfield ed.); Animal Cell Culture (1987) (R. I. Freshney, ed.); Benjamin Lewin, Genes IX, published by Jones and Bartlet, 2008 (ISBN 0763752223); Kendrew et al. (eds.), The Encyclopedia of Molecular Biology, published by Blackwell Science Ltd., 1994 (ISBN 0632021829); Robert A. Meyers (ed.), Molecular Biology and Biotechnology: a Comprehensive Desk Reference, published by VCH Publishers, Inc., 1995 (ISBN 9780471185710); Singleton et al., Dictionary of Microbiology and Molecular Biology 2nd ed., J. Wiley & Sons (New York, N.Y. 1994), March, Advanced Organic Chemistry Reactions, Mechanisms and Structure 4th ed., John Wiley & Sons (New York, N.Y. 1992); and Marten H. Hofker and Jan van Deursen, Transgenic Mouse Methods and Protocols, 2^{nd} edition (2011).

[0040] As used herein, the singular forms “a” “an”, and “the” include both singular and plural referents unless the context clearly dictates otherwise.

[0041] The term “optional” or “optionally” means that the subsequent described event, circumstance or substituent may or may not occur, and that the description includes instances where the event or circumstance occurs and instances where it does not.

[0042] The recitation of numerical ranges by endpoints includes all numbers and fractions subsumed within the respective ranges, as well as the recited endpoints.

[0043] The terms “about” or “approximately” as used herein when referring to a measurable value such as a parameter, an amount, a temporal duration, and the like, are meant to encompass variations of and from the specified value, such as variations of +/−10% or less, +/−5% or less, +/−1% or less, and +/−0.1% or less of and from the specified value, insofar such variations are appropriate to perform in the disclosed invention. It is to be understood that the value to which the modifier “about” or “approximately” refers is itself also specifically, and preferably, disclosed.

[0044] As used herein, a “biological sample” may contain whole cells and/or live cells and/or cell debris. The biological sample may contain (or be derived from) a “bodily fluid”. The present invention encompasses embodiments wherein the bodily fluid is selected from amniotic fluid, aqueous humour, vitreous humour, bile, blood serum, breast milk, cerebrospinal fluid, cerumen (earwax), chyle, chyme, endolymph, perilymph, exudates, feces, female ejaculate, gastric acid, gastric juice, lymph, mucus (including nasal drainage and phlegm), pericardial fluid, peritoneal fluid, pleural fluid, pus, rheum, saliva, sebum (skin oil), semen, sputum, synovial fluid, sweat, tears, urine, vaginal secretion, vomit and mixtures of one or more thereof. Biological samples include cell cultures, bodily fluids, cell cultures from bodily fluids. Bodily fluids may be obtained from a mammal organism, for example by puncture, or other collecting or sampling procedures.

[0045] The terms “subject,” “individual,” and “patient” are used interchangeably herein to refer to a vertebrate, preferably a mammal, more preferably a human. Mammals include, but are not limited to, murines, simians, humans, farm animals, sport animals, and pets. Tissues, cells and their progeny of a biological entity obtained in vivo or cultured in vitro are also encompassed.

[0046] Various embodiments are described hereinafter. It should be noted that the specific embodiments are not intended as an exhaustive description or as a limitation to the broader aspects discussed herein. One aspect described in conjunction with a particular embodiment is not necessarily limited to that embodiment and can be practiced with any other embodiment(s). Reference throughout this specification to “one embodiment”, “an embodiment,” “an example embodiment,” means that a particular feature, structure or characteristic described in connection with the embodiment is included in at least one embodiment of the present invention. Thus, appearances of the phrases “in one embodiment,” “in an embodiment,” or “an example embodiment” in various places throughout this specification are not necessarily all referring to the same embodiment, but may. Furthermore, the particular features, structures or characteristics may be combined in any suitable manner, as would be apparent to a person skilled in the art from this disclosure, in one or more embodiments. Furthermore, while some embodiments described herein include some but not other features included in other embodiments, combinations of features of different embodiments are meant to be within the scope of the invention. For example, in the appended claims, any of the claimed embodiments can be used in any combination.

[0047] All publications, published patent documents, and patent applications cited herein are hereby incorporated by reference to the same extent as though each individual publication, published patent document, or patent application was specifically and individually indicated as being incorporated by reference.

### Overview

[0048] Embodiments disclosed herein provide multiplex lateral flow devices and methods of use. The embodiments disclosed herein are directed to lateral flow detection devices that comprise CRISPR Cas systems for target molecule detection.

[0049] Instead of relying on general capture of antibody that was not bound by intact reporter RNAs (Gootenberg, 2018), the presently disclosed system is more suitable for detecting two targets. Applicants adapted a lateral flow approach with two separate detection lines consisting of deposited materials that capture reporter RNA appended with a fluorophore and a molecule specific to the deposited material, allowing fluorescent visualization of signal loss at detection lines due to collateral activity and cleavage of corresponding reporter RNA. Further advances were made utilizing guide design that allows for design of highly active guide RNAs for use with the specific Cas protein of the systems as well as for the desired target molecule.

### Lateral Flow Devices

[0050] In one embodiment, the invention provides a lateral flow device comprising a substrate comprising a first end and a second end. The first end may comprise a sample loading portion, a first region comprising a detectable ligand, two or more CRISPR effector systems, two or more detection constructs, and one or more first capture regions, each comprising a first binding agent. The substrate may also comprise two or more second capture regions between the first region of the first end and the second end, each second capture region comprising a different binding agent. Each of the two or more CRISPR effector systems may comprise a CRISPR effector protein and one or more guide sequences, each guide sequence configured to bind one or more target molecules.

[0051] The embodiments disclosed herein are directed to lateral flow detection devices that comprise SHERLOCK systems. SHERLOCK utilizes Cas13s non-specific RNase activity to cleave fluorescent reporters upon target recognition, providing sensitive and specific diagnostics using Cas13, including single nucleotide variants, detection based on rRNA sequences, screening for drug resistance, monitoring microbe outbreaks, genetic perturbations, and screening of environmental samples, as described, for example, in PCT/US18/054472 filed Oct. 22, 2018 at [0183]-[0327], incorporated herein by reference. Reference is made to WO 2017/219027, WO2018/107129, US20180298445, US 2018-0274017, US 2018-0305773, WO 2018/170340, U.S. application Ser. No. 15/922,837, filed Mar. 15, 2018 entitled “Devices for CRISPR Effector System Based Diagnostics”, PCT/US18/50091, filed Sep. 7, 2018 “Multi-Effector CRISPR Based Diagnostic Systems”, PCT/US18/66940 filed Dec. 20, 2018 entitled “CRISPR Effector System Based Multiplex Diagnostics”, PCT/US18/054472 filed Oct. 4, 2018 entitled “CRISPR Effector System Based Diagnostic”, U.S. Provisional 62/740,728 filed Oct. 3, 2018 entitled “CRISPR Effector System Based Diagnostics for Hemorrhagic Fever Detection”, U.S. Provisional 62/690,278 filed Jun. 26, 2018 and U.S. Provisional 62/767,059 filed Nov. 14, 2018 both entitled “CRISPR Double Nickase Based Amplification, Compositions, Systems and Methods”, U.S. Provisional 62/690,160 filed Jun. 26, 2018 and U.S. Pat. No. 62,767,077 filed Novemebr 14, 2018, both entitled “CRISPR/CAS and Transposase Based Amplification Compositions, Systems, And Methods”, U.S. Provisional 62/690,257 filed Jun. 26, 2018 and 62/767,052 filed Nov. 14, 2018 both entitled “CRISPR Effector System Based Amplification Methods, Systems, And Diagnostics”, U.S. Provisional 62/767,076 filed Nov. 14, 2018 entitled “Multiplexing Highly Evolving Viral Variants With SHERLOCK” and 62/767,070 filed Nov. 14, 2018 entitled “Droplet SHERLOCK.” Reference is further made to WO2017/127807, WO2017/184786, WO 2017/184768, WO 2017/189308, WO 2018/035388, WO 2018/170333, WO 2018/191388, WO 2018/213708, WO 2019/005866, PCT/US18/67328 filed Dec. 21, 2018 entitled “Novel CRISPR Enzymes and Systems”, PCT/US18/67225 filed Dec. 21, 2018 entitled “Novel CRISPR Enzymes and Systems” and PCT/US18/67307 filed Dec. 21, 2018 entitled “Novel CRISPR Enzymes and Systems”, U.S. 62/712,809 filed Jul. 31, 2018 entitled “Novel CRISPR Enzymes and Systems”, U.S. 62/744,080 filed Oct. 10, 2018 entitled “Novel Cas12b Enzymes and Systems” and U.S. 62/751,196 filed Oct. 26, 2018 entitled “Novel Cas12b Enzymes and Systems”, U.S. 715,640 filed August 7, 2-18 entitled “Novel CRISPR Enzymes and Systems”, WO 2016/205711, U.S. Pat. No. 9,790,490, WO 2016/205749, WO 2016/205764, WO 2017/070605, WO 2017/106657, and WO 2016/149661, WO2018/035387, WO2018/194963, Cox DBT, et al., RNA editing with CRISPR-Cas13, Science. 2017 Nov. 24; 358(6366):1019-1027; Gootenberg J S, et al., Multiplexed and portable nucleic acid detection platform with Cas13, Cas12a, and Csm6., Science. 2018 Apr. 27; 360(6387):439-444; Gootenberg J S, et al., Nucleic acid detection with CRISPR-Cas13a/C2c2, Science. 2017 Apr. 28; 356(6336):438-442; Abudayyeh O O, et al., RNA targeting with CRISPR-Cas13, Nature. 2017 Oct. 12; 550(7675):280-284; Smargon A A, et al., Cas13b Is a Type VI-B CRISPR-Associated RNA-Guided RNase Differentially Regulated by Accessory Proteins Csx27 and Csx28. Mol Cell. 2017 Feb. 16; 65(4):618-630.e7; Abudayyeh 00, et al., C2c2 is a single-component programmable RNA-guided RNA-targeting CRISPR effector, Science. 2016 Aug. 5; 353(6299):aaf5573; Yang L, et al., Engineering and optimising deaminase fusions for genome editing. Nat Commun. 2016 Nov. 2; 7:13330, Myrvhold et al., Field deployable viral diagnostics using CRISPR-Cas13, Science 2018 360, 444-448, Shmakov et al. “Diversity and evolution of class 2 CRISPR-Cas systems,” Nat Rev Microbiol. 2017 15(3):169-182, each of which is incorporated herein by reference in its entirety.

[0052] The device may comprise a lateral flow substrate for detecting a SHERLOCK reaction. Substrates suitable for use in lateral flow assays are known in the art. These may include, but are not necessarily limited to membranes or pads made of cellulose and/or glass fiber, polyesters, nitrocellulose, or absorbent pads (J Saudi Chem Soc 19(6):689-705; 2015). The SHERLOCK system, i.e. one or more CRISPR systems and corresponding reporter constructs are added to the lateral flow substrate at a defined reagent portion of the lateral flow substrate, typically on one end of the lateral flow substrate. Reporting constructs used within the context of the present invention comprise a first molecule and a second molecule linked by an RNA or DNA linker. The lateral flow substrate further comprises a sample portion. The sample portion may be equivalent to, continuous with, or adjacent to the reagent portion.

### Lateral Flow Substrate

[0053] In certain example embodiments, a lateral flow device comprises a lateral flow substrate on which detection can be performed. Substrates suitable for use in lateral flow assays are known in the art. These may include, but are not necessarily limited to, membranes or pads made of cellulose and/or glass fiber, polyesters, nitrocellulose, or absorbent pads (J Saudi Chem Soc 19(6):689-705; 2015).

[0054] Lateral support substrates comprise a first and second end, and one or more capture regions that each comprise binding agents. The first end may comprise a sample loading portion, a first region comprising a detectable ligand, two or more CRISPR effector systems, two or more detection constructs, and one or more first capture regions, each comprising a first binding agent. The substrate may also comprise two or more second capture regions between the first region of the first end and the second end, each second capture region comprising a different binding agent. Each of the two or more CRISPR effector systems may comprise a CRISPR effector protein and one or more guide sequences, each guide sequence configured to bind one or more target molecules. The lateral flow substrates may be configured to detect a SHERLOCK reaction. Reference is made to Gootenberg, et al., “Multiplexed and portable nucleic acid detection platform with Cas13, Cas12a, and Csm6,” Science. 2018 Apr. 27; 360(6387):439-444. doi: 10.1126/science.aaq0179, and International Patent Publication No, WO 2019/071051, each specifically incorporated herein by reference. Lateral support substrates may be located within a housing (see for example, “Rapid Lateral Flow Test Strips” Merck Millipore 2013). The housing may comprise at least one opening for loading samples and a second single opening or separate openings that allow for reading of detectable signal generated at the first and second capture regions.

[0055] The embodiments disclosed herein can be prepared in freeze-dried format for convenient distribution and point-of-care (POC) applications. Such embodiments are useful in multiple scenarios in human health including, for example, viral detection, bacterial strain typing, sensitive genotyping, and detection of disease-associated cell free DNA. Accordingly, the lateral substrate comprising one or more of the elements of the system, including detectable ligands, CRISPR effector systems, detection constructs and binding agents may be freeze-dried to the lateral flow substrate and packaged as a ready to use device. Alternatively, all or a portion of the elements of the system may be added to the reagent portion of the lateral flow substrate at the time of using the device.

### First End and Second End of the Substrate

[0056] The substrate of the lateral flow device comprises a first and second end. The SHERLOCK system, i.e. one or more CRISPR systems and corresponding reporter constructs are added to the lateral flow substrate at a defined reagent portion of the lateral flow substrate, typically on a first end of the lateral flow substrate. Reporting constructs used within the context of the present invention comprise a first molecule and a second molecule linked by an RNA or DNA linker. The lateral flow substrate further comprises a sample portion. The sample portion may be equivalent to, continuous with, or adjacent to the reagent portion. The first end of the substrate for application of a sample.

[0057] In certain example embodiments, the first end comprises a first region. The first region comprises a detectable ligand, two or more CRISPR effector systems, two or more detection constructs, and one or more first capture regions, each comprising a first binding agent.

### Capture Regions

[0058] The lateral flow substrate can comprise one or more capture regions. In embodiments the first end of the lateral flow substrate comprises one or more first capture regions, with two or more second capture regions between the first region of the first end of the substrate and the second end of the substrate. The capture regions may be provided as a capture line, typically a horizontal line running across the device, but other configurations are possible. The first capture region is proximate to and on the same end of the lateral flow substrate as the sample loading portion.

### Binding Agents

[0059] Specific binding-integrating molecules comprise any members of binding pairs that can be used in the present invention. Such binding pairs are known to those skilled in the art and include, but are not limited to, antibody-antigen pairs, enzyme-substrate pairs, receptor-ligand pairs, and streptavidin-biotin. In addition to such known binding pairs, novel binding pairs may be specifically designed. A characteristic of binding pairs is the binding between the two members of the binding pair.

[0060] A first binding agent that specifically binds the first molecule of the reporter construct is fixed or otherwise immobilized to the first capture region. The second capture region is located towards the opposite end of the lateral flow substrate from the first capture region. A second binding agent is fixed or otherwise immobilized at the second capture region. The second binding agent specifically binds the second molecule of the reporter construct, or the second binding agent may bind a detectable ligand. For example, the detectable ligand may be a particle, such as a colloidal particle, that when it aggregates can be detected visually, and generates a detectable positive signal. The particle may be modified with an antibody that specifically binds the second molecule on the reporter construct. If the reporter construct is not cleaved it will facilitate accumulation of the detectable ligand at the first binding region. If the reporter construct is cleaved the detectable ligand is released to flow to the second binding region. In such an embodiment, the second binding region comprises a second binding agent capable of specifically or non-specifically binding the detectable ligand on the antibody of the detectable ligand. Binding agents can be, for example, antibodies, that recognize a particular affinity tag. Such binding agents can further contain, for example, detectable labels, such as isotope labels and/or nucleic acid barcodes. A barcode is a short sequence of nucleotides (for example, DNA, RNA, or combinations thereof) that is used as an identifier. A nucleic acid barcode may have a length of 4-100 nucleotides and be either single or double-stranded. Methods for identifying cells with barcodes are known in the art. Accordingly, guide RNAs of the CRISPR effector systems described herein may be used to detect the barcode.

### Detectable Ligands

[0061] The first region is loaded with a detectable ligand, such as those disclosed herein, for example a gold nanoparticle. The detectable ligand may be a particle, such as a colloidal particle, that when it aggregates can be detected visually. The particle may be modified with an antibody that specifically binds the second molecule on the reporter construct. If the reporter construct is not cleaved it will facilitate accumulation of the detectable ligand at the first binding region. If the reporter construct is cleaved the detectable ligand is released to flow to the second binding region. In such an embodiment, the second binding agent is an agent capable of specifically or non-specifically binding the detectable ligand on the antibody on the detectable ligand. Examples of suitable binding agents for such an embodiment include, but are not limited to, protein A and protein G. In some examples, the detectable ligand is a gold nanoparticle, which may be modified with a first antibody, such as an anti-FITC antibody.

### Detection Constructs

[0062] The first region also comprises a detection construct. In one example embodiment, a RNA detection construct and a CRISPR effector system (a CRISPR effector protein and one or more guide sequences configured to bind to one or more target sequences) as disclosed herein. In one example embodiment, and for purposes of further illustration, the RNA construct may comprise a FAM molecule on a first end of the detection construction and a biotin on a second end of the detection construct. Upstream of the flow of solution from the first end of the lateral flow substrate is a first test band. The test band may comprise a biotin ligand. Accordingly, when the RNA detection construct is present it its initial state, i.e. in the absence of target, the FAM molecule on the first end will bind the anti-FITC antibody on the gold nanoparticle, and the biotin on the second end of the RNA construct will bind the biotin ligand allowing for the detectable ligand to accumulate at the first test, generating a detectable signal. Generation of a detectable signal at the first band indicates the absence of the target ligand. In the presence of target, the CRISPR effector complex forms and the CRISPR effector protein is activated resulting in cleavage of the RND detection construct. In the absence of intact RNA detection construct the colloidal gold will flow past the second strip. The lateral flow device may comprise a second band, upstream of the first band. The second band may comprise a molecule capable of binding the antibody-labeled colloidal gold molecule, for example an anti-rabbit antibody capable of binding a rabbit anti-FITC antibody on the colloidal gold. Therefore, in the presence of one or more targets, the detectable ligand will accumulate at the second band, indicating the presence of the one or more targets in the sample.

[0063] In some embodiments, the first end of the lateral flow device comprises two detection constructs and each of the two detection constructs comprises an RNA or DNA oligonucleotide, comprising a first molecule on a first end and a second molecule on a second end. The first molecule and the second molecule may be linked by an RNA or DNA linker.

[0064] In some embodiments, the first molecule on the first end of the first detection construct may be FAM and the second molecule on the second end of the first detection construct may be biotin, or vice versa. In some embodiments, the first molecule on the first end of the second detection construct may be FAM and the second molecule on the second end of the second detection construct may be Digoxigenin (DIG), or vice versa.

[0065] In some embodiments, the first end may comprise three detection constructs, wherein each of the three detection constructs comprises an RNA or DNA oligonucleotide, comprising a first molecule on a first end and a second molecule on a second end. In specific embodiments, the first and second molecules on the detection constructs comprise Tye 665 and Alexa 488; Tye 665 and FAM, and Tye 665 and Digoxigenin (DIG), respectively.

[0066] As used herein, a “detection construct” refers to a molecule that can be cleaved or otherwise deactivated by an activated CRISPR system effector protein described herein. The term “detection construct” may also be referred to in the alternative as a “masking construct.” Depending on the nuclease activity of the CRISPR effector protein, the masking construct may be a RNA-based masking construct or a DNA-based masking construct. The Nucleic Acid-based masking constructs comprises a nucleic acid element that is cleavable by a CRISPR effector protein. Cleavage of the nucleic acid element releases agents or produces conformational changes that allow a detectable signal to be produced. Example constructs demonstrating how the nucleic acid element may be used to prevent or mask generation of detectable signal are described below and embodiments of the invention comprise variants of the same. Prior to cleavage, or when the masking construct is in an ‘active’ state, the masking construct blocks the generation or detection of a positive detectable signal. It will be understood that in certain example embodiments a minimal background signal may be produced in the presence of an active masking construct. A positive detectable signal may be any signal that can be detected using optical, fluorescent, chemiluminescent, electrochemical or other detection methods known in the art. The term “positive detectable signal” is used to differentiate from other detectable signals that may be detectable in the presence of the masking construct. For example, in certain embodiments a first signal may be detected when the masking agent is present or when a CRISPR system has not been activated (i.e. a negative detectable signal), which then converts to a second signal (e.g. the positive detectable signal) upon detection of the target molecules and cleavage or deactivation of the masking agent, or upon activation of the CRISPR effector protein. The positive detectable signal, then, is a signal detected upon activation of the CRISPR effector protein, and may be, in a colorimetric or fluorescent assay, a decrease in fluorescence or color relative to a control or an increase in fluorescence or color relative to a control, depending on the configuration of the lateral flow substrate, and as described further herein.

[0067] In certain example embodiments, the masking construct may comprise a HCR initiator sequence and a cutting motif, or a cleavable structural element, such as a loop or hairpin, that prevents the initiator from initiating the HCR reaction. The cutting motif may be preferentially cut by one of the activated CRISPR effector proteins. Upon cleavage of the cutting motif or structure element by an activated CRISPR effector protein, the initiator is then released to trigger the HCR reaction, detection thereof indicating the presence of one or more targets in the sample. In certain example embodiments, the masking construct comprises a hairpin with a RNA loop. When an activated CRISPR effector protein cuts the RNA loop, the initiator can be released to trigger the HCR reaction.

[0068] In certain example embodiments, the masking construct may suppress generation of a gene product. The gene product may be encoded by a reporter construct that is added to the sample. The masking construct may be an interfering RNA involved in a RNA interference pathway, such as a short hairpin RNA (shRNA) or small interfering RNA (siRNA). The masking construct may also comprise microRNA (miRNA). While present, the masking construct suppresses expression of the gene product. The gene product may be a fluorescent protein or other RNA transcript or proteins that would otherwise be detectable by a labeled probe, aptamer, or antibody but for the presence of the masking construct. Upon activation of the effector protein the masking construct is cleaved or otherwise silenced allowing for expression and detection of the gene product as the positive detectable signal.

[0069] In specific embodiments, the masking construct comprises a silencing RNA that suppresses generation of a gene product encoded by a reporting construct, wherein the gene product generates the detectable positive signal when expressed.

[0070] In certain example embodiments, the masking construct may sequester one or more reagents needed to generate a detectable positive signal such that release of the one or more reagents from the masking construct results in generation of the detectable positive signal. The one or more reagents may combine to produce a colorimetric signal, a chemiluminescent signal, a fluorescent signal, or any other detectable signal and may comprise any reagents known to be suitable for such purposes. In certain example embodiments, the one or more reagents are sequestered by RNA aptamers that bind the one or more reagents. The one or more reagents are released when the effector protein is activated upon detection of a target molecule and the RNA or DNA aptamers are degraded.

[0071] In certain example embodiments, the masking construct may be immobilized on a solid substrate in an individual discrete volume (defined further below) and sequesters a single reagent. For example, the reagent may be a bead comprising a dye. When sequestered by the immobilized reagent, the individual beads are too diffuse to generate a detectable signal, but upon release from the masking construct are able to generate a detectable signal, for example by aggregation or simple increase in solution concentration. In certain example embodiments, the immobilized masking agent is a RNA- or DNA-based aptamer that can be cleaved by the activated effector protein upon detection of a target molecule.

[0072] In certain other example embodiments, the masking construct binds to an immobilized reagent in solution thereby blocking the ability of the reagent to bind to a separate labeled binding partner that is free in solution. Thus, upon application of a washing step to a sample, the labeled binding partner can be washed out of the sample in the absence of a target molecule. However, if the effector protein is activated, the masking construct is cleaved to a degree sufficient to interfere with the ability of the masking construct to bind the reagent thereby allowing the labeled binding partner to bind to the immobilized reagent. Thus, the labeled binding partner remains after the wash step indicating the presence of the target molecule in the sample. In certain aspects, the masking construct that binds the immobilized reagent is a DNA or RNA aptamer. The immobilized reagent may be a protein and the labeled binding partner may be a labeled antibody. Alternatively, the immobilized reagent may be streptavidin and the labeled binding partner may be labeled biotin. The label on the binding partner used in the above embodiments may be any detectable label known in the art. In addition, other known binding partners may be used in accordance with the overall design described herein.

[0073] In certain example embodiments, the masking construct may comprise a ribozyme. Ribozymes are RNA molecules having catalytic properties. Ribozymes, both naturally and engineered, comprise or consist of RNA that may be targeted by the effector proteins disclosed herein. The ribozyme may be selected or engineered to catalyze a reaction that either generates a negative detectable signal or prevents generation of a positive control signal. Upon deactivation of the ribozyme by the activated effector protein the reaction generating a negative control signal, or preventing generation of a positive detectable signal, is removed thereby allowing a positive detectable signal to be generated. In one example embodiment, the ribozyme may catalyze a colorimetric reaction causing a solution to appear as a first color. When the ribozyme is deactivated the solution then turns to a second color, the second color being the detectable positive signal. An example of how ribozymes can be used to catalyze a colorimetric reaction are described in Zhao et al. “Signal amplification of glucosamine-6-phosphate based on ribozyme glmS,” Biosens Bioelectron. 2014; 16:337-42, and provide an example of how such a system could be modified to work in the context of the embodiments disclosed herein. Alternatively, ribozymes, when present can generate cleavage products of, for example, RNA transcripts. Thus, detection of a positive detectable signal may comprise detection of non-cleaved RNA transcripts that are only generated in the absence of the ribozyme.

[0074] In some embodiments, the masking construct may be a ribozyme that generates a negative detectable signal, and wherein a positive detectable signal is generated when the ribozyme is deactivated.

[0075] In certain example embodiments, the one or more reagents is a protein, such as an enzyme, capable of facilitating generation of a detectable signal, such as a colorimetric, chemiluminescent, or fluorescent signal, that is inhibited or sequestered such that the protein cannot generate the detectable signal by the binding of one or more DNA or RNA aptamers to the protein. Upon activation of the effector proteins disclosed herein, the DNA or RNA aptamers are cleaved or degraded to an extent that they no longer inhibit the protein's ability to generate the detectable signal. In certain example embodiments, the aptamer is a thrombin inhibitor aptamer. In certain example embodiments the thrombin inhibitor aptamer has a sequence of GGGAACAAAGCUGAAGUACUUACCC (SEQ ID NO: 8). When this aptamer is cleaved, thrombin will become active and will cleave a peptide colorimetric or fluorescent substrate. In certain example embodiments, the colorimetric substrate is para-nitroanilide (pNA) covalently linked to the peptide substrate for thrombin. Upon cleavage by thrombin, pNA is released and becomes yellow in color and easily visible to the eye. In certain example embodiments, the fluorescent substrate is 7-amino-4-methylcoumarin a blue fluorophore that can be detected using a fluorescence detector. Inhibitory aptamers may also be used for horseradish peroxidase (HRP), beta-galactosidase, or calf alkaline phosphatase (CAP) and within the general principals laid out above.

[0076] In certain embodiments, RNAse or DNAse activity is detected colorimetrically via cleavage of enzyme-inhibiting aptamers. One potential mode of converting DNAse or RNAse activity into a colorimetric signal is to couple the cleavage of a DNA or RNA aptamer with the re-activation of an enzyme that is capable of producing a colorimetric output. In the absence of RNA or DNA cleavage, the intact aptamer will bind to the enzyme target and inhibit its activity. The advantage of this readout system is that the enzyme provides an additional amplification step: once liberated from an aptamer via collateral activity (e.g. Cpf1 collateral activity), the colorimetric enzyme will continue to produce colorimetric product, leading to a multiplication of signal.

[0077] In certain embodiments, an existing aptamer that inhibits an enzyme with a colorimetric readout is used. Several aptamer/enzyme pairs with colorimetric readouts exist, such as thrombin, protein C, neutrophil elastase, and subtilisin. These proteases have colorimetric substrates based upon pNA and are commercially available. In certain embodiments, a novel aptamer targeting a common colorimetric enzyme is used. Common and robust enzymes, such as beta-galactosidase, horseradish peroxidase, or calf intestinal alkaline phosphatase, could be targeted by engineered aptamers designed by selection strategies such as SELEX. Such strategies allow for quick selection of aptamers with nanomolar binding efficiencies and could be used for the development of additional enzyme/aptamer pairs for colorimetric readout.

[0078] In certain embodiments, the masking construct may be a DNA or RNA aptamer and/or may comprise a DNA or RNA-tethered inhibitor.

[0079] In certain embodiments, the masking construct may comprise a DNA or RNA oligonucleotide to which a detectable ligand and a masking component are attached.

[0080] In certain embodiments, RNAse or DNase activity is detected colorimetrically via cleavage of RNA-tethered inhibitors. Many common colorimetric enzymes have competitive, reversible inhibitors: for example, beta-galactosidase can be inhibited by galactose. Many of these inhibitors are weak, but their effect can be increased by increases in local concentration. By linking local concentration of inhibitors to DNase RNAse activity, colorimetric enzyme and inhibitor pairs can be engineered into DNase and RNAse sensors. The colorimetric DNase or RNAse sensor based upon small-molecule inhibitors involves three components: the colorimetric enzyme, the inhibitor, and a bridging RNA or DNA that is covalently linked to both the inhibitor and enzyme, tethering the inhibitor to the enzyme. In the uncleaved configuration, the enzyme is inhibited by the increased local concentration of the small molecule; when the DNA or RNA is cleaved (e.g. by Cas13 or Cas12 collateral cleavage), the inhibitor will be released and the colorimetric enzyme will be activated.

[0081] In certain embodiments, the aptamer or DNA- or RNA-tethered inhibitor may sequester an enzyme, wherein the enzyme generates a detectable signal upon release from the aptamer or DNA or RNA tethered inhibitor by acting upon a substrate. In some embodiments, the aptamer may be an inhibitor aptamer that inhibits an enzyme and prevents the enzyme from catalyzing generation of a detectable signal from a substance. In some embodiments, the DNA- or RNA-tethered inhibitor may inhibit an enzyme and may prevent the enzyme from catalyzing generation of a detectable signal from a substrate.

[0082] In certain embodiments, RNAse activity is detected colorimetrically via formation and/or activation of G-quadruplexes. G quadruplexes in DNA can complex with heme (iron (III)-protoporphyrin IX) to form a DNAzyme with peroxidase activity. When supplied with a peroxidase substrate (e.g. ABTS: (2,2′-Azinobis [3-ethylbenzothiazoline-6-sulfonic acid]-diammonium salt)), the G-quadruplex-heme complex in the presence of hydrogen peroxide causes oxidation of the substrate, which then forms a green color in solution. An example G-quadruplex forming DNA sequence is: GGGTAGGGCGGGTTGGGA (SEQ ID NO: 9). By hybridizing an additional DNA or RNA sequence, referred to herein as a “staple,” to this DNA aptamer, formation of the G-quadraplex structure will be limited. Upon collateral activation, the staple will be cleaved allowing the G quadraplex to form and heme to bind. This strategy is particularly appealing because color formation is enzymatic, meaning there is additional amplification beyond collateral activation.

[0083] In certain embodiments, the masking construct may comprise an RNA oligonucleotide designed to bind a G-quadruplex forming sequence, wherein a G-quadruplex structure is formed by the G-quadruplex forming sequence upon cleavage of the masking construct, and wherein the G-quadruplex structure generates a detectable positive signal.

[0084] In certain example embodiments, the masking construct may be immobilized on a solid substrate in an individual discrete volume (defined further below) and sequesters a single reagent. For example, the reagent may be a bead comprising a dye. When sequestered by the immobilized reagent, the individual beads are too diffuse to generate a detectable signal, but upon release from the masking construct are able to generate a detectable signal, for example by aggregation or simple increase in solution concentration. In certain example embodiments, the immobilized masking agent is a DNA- or RNA-based aptamer that can be cleaved by the activated effector protein upon detection of a target molecule.

[0085] In one example embodiment, the masking construct comprises a detection agent that changes color depending on whether the detection agent is aggregated or dispersed in solution. For example, certain nanoparticles, such as colloidal gold, undergo a visible purple to red color shift as they move from aggregates to dispersed particles. Accordingly, in certain example embodiments, such detection agents may be held in aggregate by one or more bridge molecules. At least a portion of the bridge molecule comprises RNA or DNA. Upon activation of the effector proteins disclosed herein, the RNA or DNA portion of the bridge molecule is cleaved allowing the detection agent to disperse and resulting in the corresponding change in color. In certain example embodiments, the detection agent is a colloidal metal. The colloidal metal material may include water-insoluble metal particles or metallic compounds dispersed in a liquid, a hydrosol, or a metal sol. The colloidal metal may be selected from the metals in groups IA, IB, IIB and IIIB of the periodic table, as well as the transition metals, especially those of group VIII. Preferred metals include gold, silver, aluminum, ruthenium, zinc, iron, nickel and calcium. Other suitable metals also include the following in all of their various oxidation states: lithium, sodium, magnesium, potassium, scandium, titanium, vanadium, chromium, manganese, cobalt, copper, gallium, strontium, niobium, molybdenum, palladium, indium, tin, tungsten, rhenium, platinum, and gadolinium. The metals are preferably provided in ionic form, derived from an appropriate metal compound, for example the A13+, Ru3+, Zn2+, Fe3+, Ni2+ and Ca2+ ions.

[0086] When the RNA or DNA bridge is cut by the activated CRISPR effector, the aforementioned color shift is observed. In certain example embodiments the particles are colloidal metals. In certain other example embodiments, the colloidal metal is a colloidal gold. In certain example embodiments, the colloidal nanoparticles are 15 nm gold nanoparticles (AuNPs). Due to the unique surface properties of colloidal gold nanoparticles, maximal absorbance is observed at 520 nm when fully dispersed in solution and appear red in color to the naked eye. Upon aggregation of AuNPs, they exhibit a red-shift in maximal absorbance and appear darker in color, eventually precipitating from solution as a dark purple aggregate. In certain example embodiments the nanoparticles are modified to include DNA linkers extending from the surface of the nanoparticle. Individual particles are linked together by single-stranded RNA (ssRNA) or single-stranded DNA bridges that hybridize on each end to at least a portion of the DNA linkers. Thus, the nanoparticles will form a web of linked particles and aggregate, appearing as a dark precipitate. Upon activation of the CRISPR effectors disclosed herein, the ssRNA or ssDNA bridge will be cleaved, releasing the AU NPS from the linked mesh and producing a visible red color. Example DNA linkers and bridge sequences are listed below. Thiol linkers on the end of the DNA linkers may be used for surface conjugation to the AuNPS. Other forms of conjugation may be used. In certain example embodiments, two populations of AuNPs may be generated, one for each DNA linker. This will help facilitate proper binding of the ssRNA bridge with proper orientation. In certain example embodiments, a first DNA linker is conjugated by the 3′ end while a second DNA linker is conjugated by the 5′ end.

[0087] In certain other example embodiments, the masking construct may comprise an RNA or DNA oligonucleotide to which are attached a detectable label and a masking agent of that detectable label. An example of such a detectable label/masking agent pair is a fluorophore and a quencher of the fluorophore. Quenching of the fluorophore can occur as a result of the formation of a non-fluorescent complex between the fluorophore and another fluorophore or non-fluorescent molecule. This mechanism is known as ground-state complex formation, static quenching, or contact quenching. Accordingly, the RNA or DNA oligonucleotide may be designed so that the fluorophore and quencher are in sufficient proximity for contact quenching to occur. Fluorophores and their cognate quenchers are known in the art and can be selected for this purpose by one having ordinary skill in the art. The particular fluorophore/quencher pair is not critical in the context of this invention, only that selection of the fluorophore/quencher pairs ensures masking of the fluorophore. Upon activation of the effector proteins disclosed herein, the RNA or DNA oligonucleotide is cleaved thereby severing the proximity between the fluorophore and quencher needed to maintain the contact quenching effect. Accordingly, detection of the fluorophore may be used to determine the presence of a target molecule in a sample.

[0088] In certain other example embodiments, the masking construct may comprise one or more RNA oligonucleotides to which are attached one or more metal nanoparticles, such as gold nanoparticles. In some embodiments, the masking construct comprises a plurality of metal nanoparticles crosslinked by a plurality of RNA or DNA oligonucleotides forming a closed loop. In one embodiment, the masking construct comprises three gold nanoparticles crosslinked by three RNA or DNA oligonucleotides forming a closed loop. In some embodiments, the cleavage of the RNA or DNA oligonucleotides by the CRISPR effector protein leads to a detectable signal produced by the metal nanoparticles.

[0089] In certain other example embodiments, the masking construct may comprise one or more RNA or DNA oligonucleotides to which are attached one or more quantum dots. In some embodiments, the cleavage of the RNA or DNA oligonucleotides by the CRISPR effector protein leads to a detectable signal produced by the quantum dots.

[0090] In one example embodiment, the masking construct may comprise a quantum dot. The quantum dot may have multiple linker molecules attached to the surface. At least a portion of the linker molecule comprises RNA or DNA. The linker molecule is attached to the quantum dot at one end and to one or more quenchers along the length or at terminal ends of the linker such that the quenchers are maintained in sufficient proximity for quenching of the quantum dot to occur. The linker may be branched. As above, the quantum dot/quencher pair is not critical, only that selection of the quantum dot/quencher pair ensures masking of the fluorophore. Quantum dots and their cognate quenchers are known in the art and can be selected for this purpose by one having ordinary skill in the art. Upon activation of the effector proteins disclosed herein, the RNA or DNA portion of the linker molecule is cleaved thereby eliminating the proximity between the quantum dot and one or more quenchers needed to maintain the quenching effect. In certain example embodiments the quantum dot is streptavidin conjugated. RNA or DNA are attached via biotin linkers and recruit quenching molecules with the sequences /5Biosg/UCUCGUACGUUC/3IAbRQSp/ (SEQ ID NO: 10) or /5Biosg/UCUCGUACGUUCUCUCGUACGUUC/3IAbRQSp/ (SEQ ID NO. 11) where /5Biosg/ is a biotin tag and /31AbRQSp/ is an Iowa black quencher (Iowa Black FQ). Upon cleavage, by the activated effectors disclosed herein the quantum dot will fluoresce visibly.

[0091] In specific embodiments, the detectable ligand may be a fluorophore and the masking component may be a quencher molecule.

[0092] In a similar fashion, fluorescence energy transfer (FRET) may be used to generate a detectable positive signal. FRET is a non-radiative process by which a photon from an energetically excited fluorophore (i.e. “donor fluorophore”) raises the energy state of an electron in another molecule (i.e. “the acceptor”) to higher vibrational levels of the excited singlet state. The donor fluorophore returns to the ground state without emitting a fluoresce characteristic of that fluorophore. The acceptor can be another fluorophore or non-fluorescent molecule. If the acceptor is a fluorophore, the transferred energy is emitted as fluorescence characteristic of that fluorophore. If the acceptor is a non-fluorescent molecule the absorbed energy is loss as heat. Thus, in the context of the embodiments disclosed herein, the fluorophore/quencher pair is replaced with a donor fluorophore/acceptor pair attached to the oligonucleotide molecule. When intact, the masking construct generates a first signal (negative detectable signal) as detected by the fluorescence or heat emitted from the acceptor. Upon activation of the effector proteins disclosed herein the RNA oligonucleotide is cleaved and FRET is disrupted such that fluorescence of the donor fluorophore is now detected (positive detectable signal).

[0093] In certain example embodiments, the masking construct comprises the use of intercalating dyes which change their absorbance in response to cleavage of long RNAs or DNAs to short nucleotides. Several such dyes exist. For example, pyronine-Y will complex with RNA and form a complex that has an absorbance at 572 nm. Cleavage of the RNA results in loss of absorbance and a color change. Methylene blue may be used in a similar fashion, with changes in absorbance at 688 nm upon RNA cleavage. Accordingly, in certain example embodiments the masking construct comprises a RNA and intercalating dye complex that changes absorbance upon the cleavage of RNA by the effector proteins disclosed herein.

[0094] In certain example embodiments, the masking construct may comprise an initiator for an HCR reaction. See e.g. Dirks and Pierce. PNAS 101, 15275-15728 (2004). HCR reactions utilize the potential energy in two hairpin species. When a single-stranded initiator having a portion of complementary to a corresponding region on one of the hairpins is released into the previously stable mixture, it opens a hairpin of one species. This process, in turn, exposes a single-stranded region that opens a hairpin of the other species. This process, in turn, exposes a single stranded region identical to the original initiator. The resulting chain reaction may lead to the formation of a nicked double helix that grows until the hairpin supply is exhausted. Detection of the resulting products may be done on a gel or colorimetrically. Example colorimetric detection methods include, for example, those disclosed in Lu et al. “Ultra-sensitive colorimetric assay system based on the hybridization chain reaction-triggered enzyme cascade amplification ACS Appl Mater Interfaces, 2017, 9(1):167-175, Wang et al. “An enzyme-free colorimetric assay using hybridization chain reaction amplification and split aptamers” Analyst 2015, 150, 7657-7662, and Song et al. “Non covalent fluorescent labeling of hairpin DNA probe coupled with hybridization chain reaction for sensitive DNA detection.” Applied Spectroscopy, 70(4): 686-694 (2016).

[0095] In certain example embodiments, the masking construct may comprise a HCR initiator sequence and a cleavable structural element, such as a loop or hairpin, that prevents the initiator from initiating the HCR reaction. Upon cleavage of the structure element by an activated CRISPR effector protein, the initiator is then released to trigger the HCR reaction, detection thereof indicating the presence of one or more targets in the sample. In certain example embodiments, the masking construct comprises a hairpin with a RNA loop. When an activated CRISRP effector protein cuts the RNA loop, the initiator can be released to trigger the HCR reaction.

[0096] In certain example embodiments, the masking construct may comprise a HCR initiator sequence and a cutting motif, or a cleavable structural element, such as a loop or hairpin, that prevents the initiator from initiating the HCR reaction. The cutting motif may be preferentially cut by one of the activated CRISPR effector proteins. Upon cleavage of the cutting motif or structure element by an activated CRISPR effector protein, the initiator is then released to trigger the HCR reaction, detection thereof indicating the presence of one or more targets in the sample. In certain example embodiments, the masking construct comprises a hairpin with a RNA loop. When an activated CRISPR effector protein cuts the RNA loop, the initiator can be released to trigger the HCR reaction.

[0097] In embodiments, different orthologs with different sequence specificities may be used. Cutting motifs may be used to take advantage of the sequence specificities of different orthologs. The masking construct can comprise a cutting motif preferentially cut by a Cas protein. A cutting motif sequence can be a particular nucleotide base, a repeat nucleotide base in a homopolymer, or a heteropolymer of bases. The cutting motif can be a dinucleotide sequence, a trinucleotide sequence or more complex motifs comprising 4, 5, 6, 7, 8, 9, or 10 nucleotide motifs. For example, one orthologue may preferentially cut A, while others preferentially cut C, G, U/T. Reference is made to Gootenberg, et al., “Multiplexed and portable nucleic acid detection platform with Cas13, Cas12a, and Csm6,” Science. 2018 Apr. 27; 360(6387):439-444. doi: 10.1126/science.aaq0179, and WO 2019/126577, incorporated by reference in their entirety. Accordingly, masking constructs completely comprising, or comprised of a substantial portion, of a single nucleotide may be generated, each with a different fluorophore that can be detected at differing wavelengths. In this way up to four different targets may be screened in a single individual discrete volume. In certain example embodiments, different orthologues from a same class of CRISPR effector protein may be used, such as two Cas13a orthologues, two Cas13b orthologues, or two Cas13c orthologues. In certain other example embodiments, different orthologues with different nucleotide editing preferences may be used such as a Cas13a and Cas13b orthologs, or a Cas13a and a Cas13c orthologs, or a Cas13b orthologs and a Cas13c orthologs etc. In certain example embodiments, a Cas13 protein with a polyU preference and a Cas13 protein with a polyA preference are used. In certain example embodiments, the Cas13 protein with a polyU preference is a Prevotella intermedia Cas13b, and the Cas13 protein with a polyA preference is a Prevotella sp. MA2106 Cas13b protein (PsmCas13b). In certain example embodiments, the Cas13 protein with a polyU preference is a Leptotrichia wadei Cas13a (LwaCas13a) protein and the Cas13 protein with a poly A preference is a Prevotella sp. MA2106 Cas13b protein. In certain example embodiments, the Cas13 protein with a polyU preference is Capnocytophaga canimorsus Cas13b protein (CcaCas13b).

[0098] In certain example embodiments, the masking construct suppresses generation of a detectable positive signal until cleaved, or modified by an activated CRISPR effector protein. In some embodiments, the masking construct may suppress generation of a detectable positive signal by masking the detectable positive signal, or generating a detectable negative signal instead.

### CRISPR Systems

[0099] In some embodiments, the first end of the lateral flow device comprises two or more CRISPR effector systems, also referred to as a CRISPR-Cas or CRISPR system. In some embodiments, such a CRISPR effector system may include a CRISPR effector protein and one or more guide sequences configured to bind to one or more target sequences.

[0100] The two or more CRISPR effector systems may be RNA-targeting effector proteins, DNA-targeting effector proteins, or a combination thereof. The RNA-targeting effector proteins may be a Cas13 protein, such as Cas13a, Cas13b, or Cas13c. The DNA-targeting effector protein may be a Cas12 protein such as Cpf1 and C2c1.

[0101] In general, a CRISPR-Cas or CRISPR system as used herein and in documents, such as WO 2014/093622 (PCT/US2013/074667), refers collectively to transcripts and other elements involved in the expression of or directing the activity of CRISPR-associated (“Cas”) genes, including sequences encoding a Cas gene, a tracr (trans-activating CRISPR) sequence (e.g. tracrRNA or an active partial tracrRNA), a tracr-mate sequence (encompassing a “direct repeat” and a tracrRNA-processed partial direct repeat in the context of an endogenous CRISPR system), a guide sequence (also referred to as a “spacer” in the context of an endogenous CRISPR system), or “RNA(s)” as that term is herein used (e.g., RNA(s) to guide Cas, such as Cas9, e.g. CRISPR RNA and transactivating (tracr) RNA or a single guide RNA (sgRNA) (chimeric RNA)) or other sequences and transcripts from a CRISPR locus. In general, a CRISPR system is characterized by elements that promote the formation of a CRISPR complex at the site of a target sequence (also referred to as a protospacer in the context of an endogenous CRISPR system). When the CRISPR protein is a C2c2 protein, a tracrRNA is not required. C2c2 has been described in Abudayyeh et al. (2016) “C2c2 is a single-component programmable RNA-guided RNA-targeting CRISPR effector”; Science; DOI: 10.1126/science.aaf5573; and Shmakov et al. (2015) “Discovery and Functional Characterization of Diverse Class 2 CRISPR-Cas Systems”, Molecular Cell, DOI: dx.doi.org/10.1016/j.molcel.2015.10.008; which are incorporated herein in their entirety by reference. Cas13b has been described in Smargon et al. (2017) “Cas13b Is a Type VI-B CRISPR-Associated RNA-Guided RNases Differentially Regulated by Accessory Proteins Csx27 and Csx28,” Molecular Cell. 65, 1-13; dx.doi.org/10.1016/j.molcel.2016.12.023., which is incorporated herein in its entirety by reference.

[0102] In certain embodiments, a protospacer adjacent motif (PAM) or PAM-like motif directs binding of the effector protein complex as disclosed herein to the target locus of interest. In some embodiments, the PAM may be a 5′ PAM (i.e., located upstream of the 5′ end of the protospacer). In other embodiments, the PAM may be a 3′ PAM (i.e., located downstream of the 5′ end of the protospacer). The term “PAM” may be used interchangeably with the term “PFS” or “protospacer flanking site” or “protospacer flanking sequence”.

[0103] In a preferred embodiment, the CRISPR effector protein may recognize a 3′ PAM. In certain embodiments, the CRISPR effector protein may recognize a 3′ PAM which is 5′H, wherein H is A, C or U. In certain embodiments, the effector protein may be Leptotrichia shahii C2c2p, more preferably Leptotrichia shahii DSM 19757 C2c2, and the 3′ PAM is a 5′ H.

[0104] In the context of formation of a CRISPR complex, “target molecule” or “target sequence” or “target nucleic acid” refers to a molecule harboring a sequence, or a sequence to which a guide sequence is designed to have complementarity, where hybridization between a target sequence and a guide sequence promotes the formation of a CRISPR complex. A target sequence may comprise RNA polynucleotides. The term “target RNA” refers to a RNA polynucleotide being or comprising the target sequence. In other words, the target RNA may be a RNA polynucleotide or a part of a RNA polynucleotide to which a part of the gRNA, i.e. the guide sequence, is designed to have complementarity and to which the effector function mediated by the complex comprising CRISPR effector protein and a gRNA is to be directed. In some embodiments, a target sequence is located in the nucleus or cytoplasm of a cell. A target sequence may comprise DNA polynucleotides.

[0105] As such, a CRISPR system may comprise RNA-targeting effector proteins. A CRISPR system may comprise DNA-targeting effector proteins. In some embodiments, a CRISPR system may comprise a combination of RNA- and DNA-targeting effector proteins, or effector proteins that target both RNA and DNA.

[0106] The nucleic acid molecule encoding a CRISPR effector protein, in particular C2c2, is advantageously codon optimized CRISPR effector protein. An example of a codon optimized sequence, is in this instance a sequence optimized for expression in eukaryotes, e.g., humans (i.e. being optimized for expression in humans), or for another eukaryote, animal or mammal as herein discussed; see, e.g., SaCas9 human codon optimized sequence in WO 2014/093622 (PCT/US2013/074667). Whilst this is preferred, it will be appreciated that other examples are possible and codon optimization for a host species other than human, or for codon optimization for specific organs is known. In some embodiments, an enzyme coding sequence encoding a CRISPR effector protein is a codon optimized for expression in particular cells, such as eukaryotic cells. The eukaryotic cells may be those of or derived from a particular organism, such as a plant or a mammal, including but not limited to human, or non-human eukaryote or animal or mammal as herein discussed, e.g., mouse, rat, rabbit, dog, livestock, or non-human mammal or primate. In some embodiments, processes for modifying the germ line genetic identity of human beings and/or processes for modifying the genetic identity of animals which are likely to cause them suffering without any substantial medical benefit to man or animal, and also animals resulting from such processes, may be excluded. In general, codon optimization refers to a process of modifying a nucleic acid sequence for enhanced expression in the host cells of interest by replacing at least one codon (e.g. about or more than about 1, 2, 3, 4, 5, 10, 15, 20, 25, 50, or more codons) of the native sequence with codons that are more frequently or most frequently used in the genes of that host cell while maintaining the native amino acid sequence. Various species exhibit particular bias for certain codons of a particular amino acid. Codon bias (differences in codon usage between organisms) often correlates with the efficiency of translation of messenger RNA (mRNA), which is in turn believed to be dependent on, among other things, the properties of the codons being translated and the availability of particular transfer RNA (tRNA) molecules. The predominance of selected tRNAs in a cell is generally a reflection of the codons used most frequently in peptide synthesis. Accordingly, genes can be tailored for optimal gene expression in a given organism based on codon optimization. Codon usage tables are readily available, for example, at the “Codon Usage Database” available at kazusa.orjp/codon/and these tables can be adapted in a number of ways. See Nakamura, Y., et al. “Codon usage tabulated from the international DNA sequence databases: status for the year 2000” Nucl. Acids Res. 28:292 (2000). Computer algorithms for codon optimizing a particular sequence for expression in a particular host cell are also available, such as Gene Forge (Aptagen; Jacobus, Pa.), are also available. In some embodiments, one or more codons (e.g. 1, 2, 3, 4, 5, 10, 15, 20, 25, 50, or more, or all codons) in a sequence encoding a Cas correspond to the most frequently used codon for a particular amino acid.

[0107] In certain embodiments, the methods as described herein may comprise providing a Cas transgenic cell, in particular a C2c2 transgenic cell, in which one or more nucleic acids encoding one or more guide RNAs are provided or introduced operably connected in the cell with a regulatory element comprising a promoter of one or more gene of interest. As used herein, the term “Cas transgenic cell” refers to a cell, such as a eukaryotic cell, in which a Cas gene has been genomically integrated. The nature, type, or origin of the cell are not particularly limiting according to the present invention. Also the way the Cas transgene is introduced in the cell may vary and can be any method as is known in the art. In certain embodiments, the Cas transgenic cell is obtained by introducing the Cas transgene in an isolated cell. In certain other embodiments, the Cas transgenic cell is obtained by isolating cells from a Cas transgenic organism. By means of example, and without limitation, the Cas transgenic cell as referred to herein may be derived from a Cas transgenic eukaryote, such as a Cas knock-in eukaryote. Reference is made to WO 2014/093622 (PCT/US13/74667), incorporated herein by reference. Methods of US Patent Publication Nos. 20120017290 and 20110265198 assigned to Sangamo BioSciences, Inc. directed to targeting the Rosa locus may be modified to utilize the CRISPR Cas system of the present invention. Methods of US Patent Publication No. 20130236946 assigned to Cellectis directed to targeting the Rosa locus may also be modified to utilize the CRISPR Cas system of the present invention. By means of further example reference is made to Platt et. al. (Cell; 159(2):440-455 (2014)), describing a Cas9 knock-in mouse, which is incorporated herein by reference. The Cas transgene can further comprise a Lox-Stop-polyA-Lox(LSL) cassette thereby rendering Cas expression inducible by Cre recombinase. Alternatively, the Cas transgenic cell may be obtained by introducing the Cas transgene in an isolated cell. Delivery systems for transgenes are well known in the art. By means of example, the Cas transgene may be delivered in for instance eukaryotic cell by means of vector (e.g., AAV, adenovirus, lentivirus) and/or particle and/or nanoparticle delivery, as also described herein elsewhere.

[0108] It will be understood by the skilled person that the cell, such as the Cas transgenic cell, as referred to herein may comprise further genomic alterations besides having an integrated Cas gene or the mutations arising from the sequence specific action of Cas when complexed with RNA capable of guiding Cas to a target locus.

[0109] In certain aspects the invention involves vectors, e.g. for delivering or introducing in a cell Cas and/or RNA capable of guiding Cas to a target locus (i.e. guide RNA), but also for propagating these components (e.g. in prokaryotic cells). A used herein, a “vector” is a tool that allows or facilitates the transfer of an entity from one environment to another. It is a replicon, such as a plasmid, phage, or cosmid, into which another DNA segment may be inserted so as to bring about the replication of the inserted segment. Generally, a vector is capable of replication when associated with the proper control elements. In general, the term “vector” refers to a nucleic acid molecule capable of transporting another nucleic acid to which it has been linked. Vectors include, but are not limited to, nucleic acid molecules that are single-stranded, double-stranded, or partially double-stranded; nucleic acid molecules that comprise one or more free ends, no free ends (e.g. circular); nucleic acid molecules that comprise DNA, RNA, or both; and other varieties of polynucleotides known in the art. One type of vector is a “plasmid,” which refers to a circular double stranded DNA loop into which additional DNA segments can be inserted, such as by standard molecular cloning techniques. Another type of vector is a viral vector, wherein virally-derived DNA or RNA sequences are present in the vector for packaging into a virus (e.g. retroviruses, replication defective retroviruses, adenoviruses, replication defective adenoviruses, and adeno-associated viruses (AAVs)). Viral vectors also include polynucleotides carried by a virus for transfection into a host cell. Certain vectors are capable of autonomous replication in a host cell into which they are introduced (e.g. bacterial vectors having a bacterial origin of replication and episomal mammalian vectors). Other vectors (e.g., non-episomal mammalian vectors) are integrated into the genome of a host cell upon introduction into the host cell, and thereby are replicated along with the host genome. Moreover, certain vectors are capable of directing the expression of genes to which they are operatively-linked. Such vectors are referred to herein as “expression vectors.” Common expression vectors of utility in recombinant DNA techniques are often in the form of plasmids.

[0110] Recombinant expression vectors can comprise a nucleic acid of the invention in a form suitable for expression of the nucleic acid in a host cell, which means that the recombinant expression vectors include one or more regulatory elements, which may be selected on the basis of the host cells to be used for expression, that is operatively-linked to the nucleic acid sequence to be expressed. Within a recombinant expression vector, “operably linked” is intended to mean that the nucleotide sequence of interest is linked to the regulatory element(s) in a manner that allows for expression of the nucleotide sequence (e.g. in an in vitro transcription/translation system or in a host cell when the vector is introduced into the host cell). With regards to recombination and cloning methods, mention is made of U.S. patent application Ser. No. 10/815,730, published Sep. 2, 2004 as US 2004-0171156 A1, the contents of which are herein incorporated by reference in their entirety. Thus, the embodiments disclosed herein may also comprise transgenic cells comprising the CRISPR effector system. In certain example embodiments, the transgenic cell may function as an individual discrete volume. In other words samples comprising a masking construct may be delivered to a cell, for example in a suitable delivery vesicle and if the target is present in the delivery vesicle the CRISPR effector is activated and a detectable signal generated.

[0111] The vector(s) can include the regulatory element(s), e.g., promoter(s). The vector(s) can comprise Cas encoding sequences, and/or a single, but possibly also can comprise at least 3 or 8 or 16 or 32 or 48 or 50 guide RNA(s) (e.g., sgRNAs) encoding sequences, such as 1-2, 1-3, 1-4 1-5, 3-6, 3-7, 3-8, 3-9, 3-10, 3-8, 3-16, 3-30, 3-32, 3-48, 3-50 RNA(s) (e.g., sgRNAs). In a single vector there can be a promoter for each RNA (e.g., sgRNA), advantageously when there are up to about 16 RNA(s); and, when a single vector provides for more than 16 RNA(s), one or more promoter(s) can drive expression of more than one of the RNA(s), e.g., when there are 32 RNA(s), each promoter can drive expression of two RNA(s), and when there are 48 RNA(s), each promoter can drive expression of three RNA(s). By simple arithmetic and well established cloning protocols and the teachings in this disclosure one skilled in the art can readily practice the invention as to the RNA(s) for a suitable exemplary vector such as AAV, and a suitable promoter such as the U6 promoter. For example, the packaging limit of AAV is ˜4.7 kb. The length of a single U6-gRNA (plus restriction sites for cloning) is 361 bp. Therefore, the skilled person can readily fit about 12-16, e.g., 13 U6-gRNA cassettes in a single vector. This can be assembled by any suitable means, such as a golden gate strategy used for TALE assembly (genome-engineering.org/taleffectors/). The skilled person can also use a tandem guide strategy to increase the number of U6-gRNAs by approximately 1.5 times, e.g., to increase from 12-16, e.g., 13 to approximately 18-24, e.g., about 19 U6-gRNAs. Therefore, one skilled in the art can readily reach approximately 18-24, e.g., about 19 promoter-RNAs, e.g., U6-gRNAs in a single vector, e.g., an AAV vector. A further means for increasing the number of promoters and RNAs in a vector is to use a single promoter (e.g., U6) to express an array of RNAs separated by cleavable sequences. And an even further means for increasing the number of promoter-RNAs in a vector, is to express an array of promoter-RNAs separated by cleavable sequences in the intron of a coding sequence or gene; and, in this instance it is advantageous to use a polymerase II promoter, which can have increased expression and enable the transcription of long RNA in a tissue specific manner. (see, e.g., nar.oxfordjoumals.org/content/34/7/e53.short and nature.com/mt/journal/v16/n9/abs/mt2008144a.html). In an advantageous embodiment, AAV may package U6 tandem gRNA targeting up to about 50 genes. Accordingly, from the knowledge in the art and the teachings in this disclosure the skilled person can readily make and use vector(s), e.g., a single vector, expressing multiple RNAs or guides under the control or operatively or functionally linked to one or more promoters—especially as to the numbers of RNAs or guides discussed herein, without any undue experimentation.

[0112] The guide RNA(s) encoding sequences and/or Cas encoding sequences, can be functionally or operatively linked to regulatory element(s) and hence the regulatory element(s) drive expression. The promoter(s) can be constitutive promoter(s) and/or conditional promoter(s) and/or inducible promoter(s) and/or tissue specific promoter(s). The promoter can be selected from the group consisting of RNA polymerases, pol I, pol II, pol III, T7, U6, H1, retroviral Rous sarcoma virus (RSV) LTR promoter, the cytomegalovirus (CMV) promoter, the SV40 promoter, the dihydrofolate reductase promoter, the 3-actin promoter, the phosphoglycerol kinase (PGK) promoter, and the EF1α promoter. An advantageous promoter is the promoter is U6.

[0113] In some embodiments, one or more elements of a nucleic acid-targeting system is derived from a particular organism comprising an endogenous CRISPR RNA-targeting system. In certain example embodiments, the effector protein CRISPR RNA-targeting system comprises at least one HEPN domain, including but not limited to the HEPN domains described herein, HEPN domains known in the art, and domains recognized to be HEPN domains by comparison to consensus sequence motifs. Several such domains are provided herein. In one non-limiting example, a consensus sequence can be derived from the sequences of C2c2 or Cas13b orthologs provided herein. In certain example embodiments, the effector protein comprises a single HEPN domain. In certain other example embodiments, the effector protein comprises two HEPN domains.

[0114] In one example embodiment, the effector protein comprises one or more HEPN domains comprising a RxxxxH motif sequence. The RxxxxH motif sequence can be, without limitation, from a HEPN domain described herein or a HEPN domain known in the art. RxxxxH motif sequences further include motif sequences created by combining portions of two or more HEPN domains. As noted, consensus sequences can be derived from the sequences of the orthologs disclosed in U.S. Provisional Patent Application 62/432,240 entitled “Novel CRISPR Enzymes and Systems,” U.S. Provisional Patent Application 62/471,710 entitled “Novel Type VI CRISPR Orthologs and Systems” filed on Mar. 15, 2017, and U.S. Provisional Patent Application entitled “Novel Type VI CRISPR Orthologs and Systems,” labeled as attorney docket number 47627-05-2133 and filed on Apr. 12, 2017.

[0115] In an embodiment of the invention, a HEPN domain comprises at least one RxxxxH motif comprising the sequence of R(N/H/K)X1X2X3H In an embodiment of the invention, a HEPN domain comprises a RxxxxH motif comprising the sequence of R(N/H)X1X2X3H In an embodiment of the invention, a HEPN domain comprises the sequence of R(N/K)X1X2X3H In certain embodiments, X1 is R, S, D, E, Q, N, G, Y, or H. In certain embodiments, X2 is I, S, T, V, or L. In certain embodiments, X3 is L, F, N, Y, V, I, S, D, E, or A.

[0116] CRISPR-Cas Systems

[0117] Embodiments disclosed herein utilize Cas proteins possessing non-specific nuclease collateral activity to cleave detectable reporters upon target recognition, providing sensitive and specific diagnostics, including single nucleotide variants, detection based on rRNA sequences, screening for drug resistance, monitoring microbe outbreaks, genetic perturbations, and screening of environmental samples, as described, for example, in PCT/US18/054472 filed Oct. 22, 2018 at [0183]-[0327], incorporated herein by reference. Reference is made to WO 2017/219027, WO2018/107129, US20180298445, US 2018-0274017, US 2018-0305773, WO 2018/170340, U.S. application Ser. No. 15/922,837, filed Mar. 15, 2018 entitled “Devices for CRISPR Effector System Based Diagnostics”, PCT/US18/50091, filed Sep. 7, 2018 “Multi-Effector CRISPR Based Diagnostic Systems”, PCT/US18/66940 filed Dec. 20, 2018 entitled “CRISPR Effector System Based Multiplex Diagnostics”, PCT/US18/054472 filed Oct. 4, 2018 entitled “CRISPR Effector System Based Diagnostic”, U.S. Provisional 62/740,728 filed Oct. 3, 2018 entitled “CRISPR Effector System Based Diagnostics for Hemorrhagic Fever Detection”, U.S. Provisional 62/690,278 filed Jun. 26, 2018 and U.S. Provisional 62/767,059 filed Nov. 14, 2018 both entitled “CRISPR Double Nickase Based Amplification, Compositions, Systems and Methods”, U.S. Provisional 62/690,160 filed Jun. 26, 2018 and U.S. Pat. No. 62,767,077 filed Nov. 14, 2018, both entitled “CRISPR/CAS and Transposase Based Amplification Compositions, Systems, And Methods”, U.S. Provisional 62/690,257 filed Jun. 26, 2018 and 62/767,052 filed Nov. 14, 2018 both entitled “CRISPR Effector System Based Amplification Methods, Systems, And Diagnostics”, U.S. Provisional 62/767,076 filed Nov. 14, 2018 entitled “Multiplexing Highly Evolving Viral Variants With SHERLOCK” and 62/767,070 filed Nov. 14, 2018 entitled “Droplet SHERLOCK.” Reference is further made to WO2017/127807, WO2017/184786, WO 2017/184768, WO 2017/189308, WO 2018/035388, WO 2018/170333, WO 2018/191388, WO 2018/213708, WO 2019/005866, PCT/US18/67328 filed Dec. 21, 2018 entitled “Novel CRISPR Enzymes and Systems”, PCT/US18/67225 filed Dec. 21, 2018 entitled “Novel CRISPR Enzymes and Systems” and PCT/US18/67307 filed Dec. 21, 2018 entitled “Novel CRISPR Enzymes and Systems”, U.S. 62/712,809 filed Jul. 31, 2018 entitled “Novel CRISPR Enzymes and Systems”, U.S. 62/744,080 filed Oct. 10, 2018 entitled “Novel Cas12b Enzymes and Systems” and U.S. 62/751,196 filed Oct. 26, 2018 entitled “Novel Cas12b Enzymes and Systems”, U.S. 715,640 filed August 7, 2-18 entitled “Novel CRISPR Enzymes and Systems”, WO 2016/205711, U.S. Pat. No. 9,790,490, WO 2016/205749, WO 2016/205764, WO 2017/070605, WO 2017/106657, and WO 2016/149661, WO2018/035387, WO2018/194963, Cox DBT, et al., RNA editing with CRISPR-Cas13, Science. 2017 Nov. 24; 358(6366):1019-1027; Gootenberg J S, et al., Multiplexed and portable nucleic acid detection platform with Cas13, Cas12a, and Csm6, Science. 2018 Apr. 27; 360(6387):439-444; Gootenberg J S, et al., Nucleic acid detection with CRISPR-Cas13a/C2c2, Science. 2017 Apr. 28; 356(6336):438-442; Abudayyeh 00, et al., RNA targeting with CRISPR-Cas13, Nature. 2017 Oct. 12; 550(7675):280-284; Smargon A A, et al., Cas13b Is a Type VI-B CRISPR-Associated RNA-Guided RNase Differentially Regulated by Accessory Proteins Csx27 and Csx28. Mol Cell. 2017 Feb. 16; 65(4):618-630.e7; Abudayyeh 00, et al., C2c2 is a single-component programmable RNA-guided RNA-targeting CRISPR effector, Science. 2016 Aug. 5; 353(6299):aaf5573; Yang L, et al., Engineering and optimising deaminase fusions for genome editing. Nat Commun. 2016 Nov. 2; 7:13330, Myhrvold et al., Field deployable viral diagnostics using CRISPR-Cas13, Science 2018 360, 444-448, Shmakov et al. “Diversity and evolution of class 2 CRISPR-Cas systems,” Nat Rev Microbiol. 2017 15(3):169-182, each of which is incorporated herein by reference in its entirety.

[0118] When using two or more CRISPR effector systems, the CRISPR effector systems may be RNA-targeting effector proteins, DNA-targeting effector proteins, or a combination thereof. The RNA-targeting effector proteins may be a Type VI Cas protein, such as Cas13 protein, including Cas13b, Cas13c, or Cas13d. The DNA-targeting effector protein may be a Type V Cas protein, such as Cas12a (Cpf1), Cas12b (C2c2), Cas12c (C2c3), Cas X, Cas Y, or Cas14.

[0119] In general, a CRISPR-Cas or CRISPR system as used in herein and in documents, such as WO 2014/093622 (PCT/US2013/074667), refers collectively to transcripts and other elements involved in the expression of or directing the activity of CRISPR-associated (“Cas”) genes, including sequences encoding a Cas gene, a tracr (trans-activating CRISPR) sequence (e.g. tracrRNA or an active partial tracrRNA), a tracr-mate sequence (encompassing a “direct repeat” and a tracrRNA-processed partial direct repeat in the context of an endogenous CRISPR system), a guide sequence (also referred to as a “spacer” in the context of an endogenous CRISPR system), or “RNA(s)” as that term is herein used (e.g., RNA(s) to guide Cas, such as Cas9, e.g. CRISPR RNA and transactivating (tracr) RNA or a single guide RNA (sgRNA) (chimeric RNA)) or other sequences and transcripts from a CRISPR locus. In general, a CRISPR system is characterized by elements that promote the formation of a CRISPR complex at the site of a target sequence (also referred to as a protospacer in the context of an endogenous CRISPR system). See, e.g, Shmakov et al. (2015) “Discovery and Functional Characterization of Diverse Class 2 CRISPR-Cas Systems”, Molecular Cell, DOI: dx.doi.org/10.1016/j.molcel.2015.10.008.

### RNA Targeting Cas Protein

[0120] In an aspect, the invention utilizes an RNA targeting Cas protein. In certain embodiments, protospacer flanking site, or protospacer flanking sequence (PFS) directs binding of the effector proteins (e.g. Type VI) as disclosed herein to the target locus of interest. A PFS is a region that can affect the efficacy of Cas13a mediated targeting, and may be adjacent to the protospacer target in certain Cas13a proteins, while other orthologs do not require a specific PFS. In a preferred embodiment, the CRISPR effector protein may recognize a 3′ PFS. In certain embodiments, the CRISPR effector protein may recognize a 3′ PFS which is 5′H, wherein H is A, C or U. See, e.g. Abudayyeh, 2016. In certain embodiments, the effector protein may be Leptotrichia shahii Cas13p, more preferably Leptotrichia shahii DSM 19757 Cas13, and the 3′ PFS is a 5′ H.

[0121] In the context of formation of a CRISPR complex, “target molecule” or “target sequence” or “target nucleic acid” refers to a molecule harboring a sequence, or a sequence to which a guide sequence is designed to have complementarity, where hybridization between a target sequence and a guide sequence promotes the formation of a CRISPR complex. A target sequence may comprise RNA polynucleotides. The term “target RNA” refers to a RNA polynucleotide being or comprising the target sequence. In other words, the target RNA may be a RNA polynucleotide or a part of a RNA polynucleotide to which a part of the gRNA, i.e. the guide sequence, is designed to have complementarity and to which the effector function mediated by the complex comprising CRISPR effector protein and a gRNA is to be directed. In some embodiments, a target sequence is located in the nucleus or cytoplasm of a cell. A target sequence may comprise DNA polynucleotides.

[0122] As such, a CRISPR system may comprise RNA-targeting effector proteins. A CRISPR system may comprise DNA-targeting effector proteins. In some embodiments, a CRISPR system may comprise a combination of RNA- and DNA-targeting effector proteins, or effector proteins that target both RNA and DNA.

[0123] In some embodiments, one or more elements of a nucleic acid-targeting system is derived from a particular organism comprising an endogenous CRISPR RNA-targeting system. In certain example embodiments, the effector protein CRISPR RNA-targeting system comprises at least one HEPN domain, including but not limited to the HEPN domains described herein, HEPN domains known in the art, and domains recognized to be HEPN domains by comparison to consensus sequence motifs. Several such domains are provided herein. In one non-limiting example, a consensus sequence can be derived from the sequences of Cas13a or Cas13b orthologs provided herein. In certain example embodiments, the effector protein comprises a single HEPN domain. In certain other example embodiments, the effector protein comprises two HEPN domains.

[0124] In one example embodiment, the effector protein comprises one or more HEPN domains comprising a RxxxxH motif sequence. The RxxxxH motif sequence can be, without limitation, from a HEPN domain described herein or a HEPN domain known in the art. RxxxxH motif sequences further include motif sequences created by combining portions of two or more HEPN domains. As noted, consensus sequences can be derived from the sequences of the orthologs disclosed in U.S. Provisional Patent Application 62/432,240 entitled “Novel CRISPR Enzymes and Systems,” U.S. Provisional Patent Application 62/471,710 entitled “Novel Type VI CRISPR Orthologs and Systems” filed on Mar. 15, 2017, and U.S. Provisional Patent Application entitled “Novel Type VI CRISPR Orthologs and Systems,” labeled as attorney docket number 47627-05-2133 and filed on Apr. 12, 2017.

[0125] In an embodiment of the invention, a HEPN domain comprises at least one RxxxxH motif comprising the sequence of R(N/H/K)X1X2X3H (SEQ ID NO:XX). In an embodiment of the invention, a HEPN domain comprises a RxxxxH motif comprising the sequence of R(N/H)X1X2X3H (SEQ ID NO:XX). In an embodiment of the invention, a HEPN domain comprises the sequence of R(N/K)X1X2X3H (SEQ ID NO:XX). In certain embodiments, X1 is R, S, D, E, Q, N, G, Y, or H. In certain embodiments, X2 is I, S, T, V, or L. In certain embodiments, X3 is L, F, N, Y, V, I, S, D, E, or A.

[0126] In particular embodiments, the Type VI RNA-targeting Cas enzyme is Cas13a. In other example embodiments, the Type VI RNA-targeting Cas enzyme is Cas13b. In certain embodiments, the Cas13b protein is from an organism of a genus selected from the group consisting of: Bergeyella, Prevotella, Porphyromonas, Bacterioides, Alistipes, Riemerella, Myroides, Capnocytophaga, Porphyromonas, Flavobacterium, Porphyromonas, Chryseobacterium, Paludibacter, Psychroflexus, Riemerella, Phaeodactylibacter, Sinomicrobium, Reichenbachiella.

[0127] In particular embodiments, the homologue or orthologue of a Type VI protein such as Cas13a as referred to herein has a sequence homology or identity of at least 30%, or at least 40%, or at least 50%, or at least 60%, or at least 70%, or at least 80%, more preferably at least 85%, even more preferably at least 90%, such as for instance at least 95% with a Type VI protein such as Cas13a (e.g., based on the wild-type sequence of any of Leptotrichia shahii Cas13a, Lachnospiraceae bacterium MA2020 Cas13a, Lachnospiraceae bacterium NK4A179 Cas13a, Clostridium aminophilum (DSM 10710) Cas13a, Carnobacterium gallinarum (DSM 4847) Cas13, Paludibacter propionicigenes (WB4) Cas13, Listeria weihenstephanensis (FSL R9-0317) Cas13, Listeriaceae bacterium (FSL M6-0635) Cas13, Listeria newyorkensis (FSL M6-0635) Cas13, Leptotrichia wadei (F0279) Cas13, Rhodobacter capsulatus (SB 1003) Cas13, Rhodobacter capsulatus (R121) Cas13, Rhodobacter capsulatus (DE442) Cas13, Leptotrichia wadei (Lw2) Cas13, or Listeria seeligeri Cas13). In further embodiments, the homologue or orthologue of a Type VI protein such as Cas13 as referred to herein has a sequence identity of at least 30%, or at least 40%, or at least 50%, or at least 60%, or at least 70%, or at least 80%, more preferably at least 85%, even more preferably at least 90%, such as for instance at least 95% with the wild type Cas13 (e.g., based on the wild-type sequence of any of Leptotrichia shahii Cas13, Lachnospiraceae bacterium MA2020 Cas13, Lachnospiraceae bacterium NK4A179 Cas13, Clostridium aminophilum (DSM 10710) Cas13, Carnobacterium gallinarum (DSM 4847) Cas13, Paludibacter propionicigenes (WB4) Cas13, Listeria weihenstephanensis (FSL R9-0317) Cas13, Listeriaceae bacterium (FSL M6-0635) Cas13, Listeria newyorkensis (FSL M6-0635) Cas13, Leptotrichia wadei (F0279) Cas13, Rhodobacter capsulatus (SB 1003) Cas13, Rhodobacter capsulatus (R121) Cas13, Rhodobacter capsulatus (DE442) Cas13, Leptotrichia wadei (Lw2) Cas13, or Listeria seeligeri Cas13).

[0128] In certain other example embodiments, the CRISPR system the effector protein is a Cas13 nuclease. The activity of Cas13 may depend on the presence of two HEPN domains. These have been shown to be RNase domains, i.e. nuclease (in particular an endonuclease) cutting RNA. Cas13a HEPN may also target DNA, or potentially DNA and/or RNA. On the basis that the HEPN domains of Cas13a are at least capable of binding to and, in their wild-type form, cutting RNA, then it is preferred that the Cas13a effector protein has RNase function. Regarding Cas13a CRISPR systems, reference is made to U.S. Provisional 62/351,662 filed on Jun. 17, 2016 and U.S. Provisional 62/376,377 filed on Aug. 17, 2016. Reference is also made to U.S. Provisional 62/351,803 filed on Jun. 17, 2016. Reference is also made to U.S. Provisional entitled “Novel Crispr Enzymes and Systems” filed Dec. 8, 2016 bearing Broad Institute No. 10035.PA4 and Attorney Docket No. 47627.03.2133. Reference is further made to East-Seletsky et al. “Two distinct RNase activities of CRISPR-C2c2 enable guide-RNA processing and RNA detection” Nature doi:10/1038/nature19802 and Abudayyeh et al. “C2c2 is a single-component programmable RNA-guided RNA targeting CRISPR effector” bioRxiv doi:10.1101/054742.

[0129] RNase function in CRISPR systems is known, for example mRNA targeting has been reported for certain type III CRISPR-Cas systems (Hale et al., 2014, Genes Dev, vol. 28, 2432-2443; Hale et al., 2009, Cell, vol. 139, 945-956; Peng et al., 2015, Nucleic acids research, vol. 43, 406-417) and provides significant advantages. In the Staphylococcus epidermis type III-A system, transcription across targets results in cleavage of the target DNA and its transcripts, mediated by independent active sites within the Cas10-Csm ribonucleoprotein effector protein complex (see, Samai et al., 2015, Cell, vol. 151, 1164-1174). A CRISPR-Cas system, composition or method targeting RNA via the present effector proteins is thus provided.

[0130] In an embodiment, the Cas protein may be a Cas13a ortholog of an organism of a genus which includes but is not limited to Leptotrichia, Listeria, Corynebacter, Sutterella, Legionella, Treponema, Filifactor, Eubacterium, Streptococcus, Lactobacillus, Mycoplasma, Bacteroides, Flaviivola, Flavobacterium, Sphaerochaeta, Azospirillum, Gluconacetobacter, Neisseria, Roseburia, Parvibaculum, Staphylococcus, Nitratifractor, Mycoplasma and Campylobacter. Species of organism of such a genus can be as otherwise herein discussed.

[0131] It will be appreciated that any of the functionalities described herein may be engineered into CRISPR enzymes from other orthologs, including chimeric enzymes comprising fragments from multiple orthologs. Examples of such orthologs are described elsewhere herein. Thus, chimeric enzymes may comprise fragments of CRISPR enzyme orthologs of an organism which includes but is not limited to Leptotrichia, Listeria, Corynebacter, Sutterella, Legionella, Treponema, Filifactor, Eubacterium, Streptococcus, Lactobacillus, Mycoplasma, Bacteroides, Flaviivola, Flavobacterium, Sphaerochaeta, Azospirillum, Gluconacetobacter, Neisseria, Roseburia, Parvibaculum, Staphylococcus, Nitratifractor, Mycoplasma and Campylobacter. A chimeric enzyme can comprise a first fragment and a second fragment, and the fragments can be of CRISPR enzyme orthologs of organisms of genera herein mentioned or of species herein mentioned; advantageously the fragments are from CRISPR enzyme orthologs of different species.

[0132] In embodiments, the Cas13a protein as referred to herein also encompasses a functional variant of Cas13a or a homologue or an orthologue thereof. A “functional variant” of a protein as used herein refers to a variant of such protein which retains at least partially the activity of that protein. Functional variants may include mutants (which may be insertion, deletion, or replacement mutants), including polymorphs, etc. Also included within functional variants are fusion products of such protein with another, usually unrelated, nucleic acid, protein, polypeptide or peptide. Functional variants may be naturally occurring or may be man-made. Advantageous embodiments can involve engineered or non-naturally occurring Type VI RNA-targeting effector protein.

[0133] In an embodiment, nucleic acid molecule(s) encoding the Cas13 or an ortholog or homolog thereof, may be codon-optimized for expression in a eukaryotic cell. A eukaryote can be as herein discussed. Nucleic acid molecule(s) can be engineered or non-naturally occurring.

[0134] In an embodiment, the Cas13a or an ortholog or homolog thereof, may comprise one or more mutations (and hence nucleic acid molecule(s) coding for same may have mutation(s). The mutations may be artificially introduced mutations and may include but are not limited to one or more mutations in a catalytic domain. Examples of catalytic domains with reference to a Cas9 enzyme may include but are not limited to RuvC I, RuvC II, RuvC III and HNH domains.

[0135] In an embodiment, the Cas13a or an ortholog or homolog thereof, may comprise one or more mutations. The mutations may be artificially introduced mutations and may include but are not limited to one or more mutations in a catalytic domain. Examples of catalytic domains with reference to a Cas enzyme may include but are not limited to HEPN domains.

[0136] In an embodiment, the Cas13a or an ortholog or homolog thereof, may be used as a generic nucleic acid binding protein with fusion to or being operably linked to a functional domain. Exemplary functional domains may include but are not limited to translational initiator, translational activator, translational repressor, nucleases, in particular ribonucleases, a spliceosome, beads, a light inducible/controllable domain or a chemically inducible/controllable domain.

[0137] In certain example embodiments, the Cas13a effector protein may be from an organism selected from the group consisting of, Leptotrichia, Listeria, Corynebacter, Sutterella, Legionella, Treponema, Filifactor, Eubacterium, Streptococcus, Lactobacillus, Mycoplasma, Bacteroides, Flaviivola, Flavobacterium, Sphaerochaeta, Azospirillum, Gluconacetobacter, Neisseria, Roseburia, Parvibaculum, Staphylococcus, Nitratifractor, Mycoplasma, and Campylobacter.

[0138] In certain embodiments, the effector protein may be a Listeria sp. Cas13p, preferably Listeria seeligeria Cas13p, more preferably Listeria seeligeria serovar 1/2b str. SLCC3954 Cas13p and the crRNA sequence may be 44 to 47 nucleotides in length, with a 5′ 29-nt direct repeat (DR) and a 15-nt to 18-nt spacer.

[0139] In certain embodiments, the effector protein may be a Leptotrichia sp. Cas13p, preferably Leptotrichia shahii Cas13p, more preferably Leptotrichia shahii DSM 19757 Cas13p and the crRNA sequence may be 42 to 58 nucleotides in length, with a 5′ direct repeat of at least 24 nt, such as a 5′ 24-28-nt direct repeat (DR) and a spacer of at least 14 nt, such as a 14-nt to 28-nt spacer, or a spacer of at least 18 nt, such as 19, 20, 21, 22, or more nt, such as 18-28, 19-28, 20-28, 21-28, or 22-28 nt.

[0140] In certain example embodiments, the effector protein may be a Leptotrichia sp., Leptotrichia wadei F0279, or a Listeria sp., preferably Listeria newyorkensis FSL M6-0635.

[0141] In certain example embodiments, the Cas13 effector proteins of the invention include, without limitation, the following 21 ortholog species (including multiple CRISPR loci: Leptotrichia shahii; Leptotrichia wadei (Lw2); Listeria seeligeri; Lachnospiraceae bacterium MA2020; Lachnospiraceae bacterium NK4A179; [Clostridium] aminophilum DSM 10710; Carnobacterium gallinarum DSM 4847; Carnobacterium gallinarum DSM 4847 (second CRISPR Loci); Paludibacter propionicigenes WB4; Listeria weihenstephanensis FSL R9-0317; Listeriaceae bacterium FSL M6-0635; Leptotrichia wadei F0279; Rhodobacter capsulatus SB 1003; Rhodobacter capsulatus R121; Rhodobacter capsulatus DE442; Leptotrichia buccalis C-1013-b; Herbinix hemicellulosilytica; [Eubacterium] rectale; Eubacteriaceae bacterium CHKCI004; Blautia sp. Marseille-P2398; and Leptotrichia sp. oral taxon 879 str. F0557. Twelve (12) further non-limiting examples are: Lachnospiraceae bacterium NK4A144; Chloroflexus aggregans; Demequina aurantiaca; Thalassospira sp. TSL5-1; Pseudobutyrivibrio sp. OR37; Butyrivibrio sp. YAB3001; Blautia sp. Marseille-P2398; Leptotrichia sp. Marseille-P3007; Bacteroides ihuae; Porphyromonadaceae bacterium KH3CP3RA; Listeria riparia; and Insolitispirillum peregrinum.

[0142] In certain embodiments, the Cas13 protein according to the invention is or is derived from one of the orthologues as described herein, or is a chimeric protein of two or more of the orthologues as described herein, or is a mutant or variant of one of the orthologues as described in the table below (or a chimeric mutant or variant), including dead Cas13, split Cas13, destabilized Cas13, etc. as defined herein elsewhere, with or without fusion with a heterologous/functional domain.

[0143] In certain example embodiments, the Cas13a effector protein is from an organism of a genus selected from the group consisting of: Leptotrichia, Listeria, Corynebacter, Sutterella, Legionella, Treponema, Filifactor, Eubacterium, Streptococcus, Lactobacillus, Mycoplasma, Bacteroides, Flaviivola, Flavobacterium, Sphaerochaeta, Azospirillum, Gluconacetobacter, Neisseria, Roseburia, Parvibaculum, Staphylococcus, Nitratifractor, Mycoplasma, Campylobacter, and Lachnospira.

[0144] In an embodiment of the invention, there is provided an effector protein which comprises an amino acid sequence having at least 80% sequence homology to the wild-type sequence of any of Leptotrichia shahii Cas13, Lachnospiraceae bacterium MA2020 Cas13, Lachnospiraceae bacterium NK4A179 Cas13, Clostridium aminophilum (DSM 10710) Cas13, Carnobacterium gallinarum (DSM 4847) Cas13, Paludibacter propionicigenes (WB4) Cas13, Listeria weihenstephanensis (FSL R9-0317) Cas13, Listeriaceae bacterium (FSL M6-0635) Cas13, Listeria newyorkensis (FSL M6-0635) Cas13, Leptotrichia wadei (F0279) Cas13, Rhodobacter capsulatus (SB 1003) Cas13, Rhodobacter capsulatus (R121) Cas13, Rhodobacter capsulatus (DE442) Cas13, Leptotrichia wadei (Lw2) Cas13, or Listeria seeligeri Cas13. According to the invention, a consensus sequence can be generated from multiple Cas13 orthologs, which can assist in locating conserved amino acid residues, and motifs, including but not limited to catalytic residues and HEPN motifs in Cas13 orthologs that mediate Cas13 function. One such consensus sequence, generated from selected orthologs.

[0145] In an embodiment of the invention, the effector protein comprises an amino acid sequence having at least 80% sequence homology to a Type VI effector protein consensus sequence including but not limited to a consensus sequence described herein.

[0146] In another non-limiting example, a sequence alignment tool to assist generation of a consensus sequence and identification of conserved residues is the MUSCLE alignment tool (www.ebi.ac.uk/Tools/msa/muscle/). For example, using MUSCLE, the following amino acid locations conserved among Cas13a orthologs can be identified in Leptotrichia wadei Cas13a:K2; K5; V6; E301; L331; I335; N341; G351; K352; E375; L392; L396; D403; F446; I466; I470; R474 (HEPN); H475; H479 (HEPN), E508; P556; L561; I595; Y596; F600; Y669; I673; F681; L685; Y761; L676; L779; Y782; L836; D847; Y863; L869; I872; K879; I933; L954; I958; R961; Y965; E970; R971; D972; R1046 (HEPN), H1051 (HEPN), Y1075; D1076; K1078; K1080; 11083; 11090.

[0147] In certain example embodiments, the RNA-targeting effector protein is a Type VI-B effector protein, such as Cas13b and Group 29 or Group 30 proteins. In certain example embodiments, the RNA-targeting effector protein comprises one or more HEPN domains. In certain example embodiments, the RNA-targeting effector protein comprises a C-terminal HEPN domain, a N-terminal HEPN domain, or both. Regarding example Type VI-B effector proteins that may be used in the context of this invention, reference is made to U.S. application Ser. No. 15/331,792 entitled “Novel CRISPR Enzymes and Systems” and filed Oct. 21, 2016, International Patent Application No. PCT/US2016/058302 entitled “Novel CRISPR Enzymes and Systems”, and filed Oct. 21, 2016, and Smargon et al. “Cas13b is a Type VI-B CRISPR-associated RNA-Guided RNase differentially regulated by accessory proteins Csx27 and Csx28” Molecular Cell, 65, 1-13 (2017); dx.doi.org/10.1016/j.molcel.2016.12.023. In certain example embodiments, the Cas13b effector protein is, or comprises an amino acid sequence having at least 80% sequence homology to any of the sequences of Table 1 of International Patent Application No. PCT/US2016/058302. Further reference is made to example Type VI-B effector proteins of U.S. Provisional Application Nos. 62/471,710, 62/566,829 and International Patent Publication No. WO2018/1703333, entitled “Novel Cas13b Orthologues CRISPR Enzymes and System”. In particular embodiments, the Cas13b enzyme is derived from Bergeyella zoohelcum. In certain other example embodiments, the effector protein is, or comprises an amino acid sequence having at least 80% sequence homology to any of the sequences listed in Tables 1A or 1B of International Patent Publication No. WO2018/1703333, specifically incorporated herein by reference. In certain embodiments, the Cas13b effector protein is, or comprises an amino acid sequence having at least 80% sequence homology to any of the polypeptides in U.S. Provisional Applications 62/484,791, 62/561,662, 62/568,129 or International Patent Publication WO2018/191388, all entitled “Novel Type VI CRISPR Orthologs and Systems,” incorporated herein by reference. In certain embodiments, the Cas13b effector protein is, or comprises an amin acid sequence having at least 80% sequence homology to a polypeptide as set forth in FIG. 1 of International Patent Publication WO2018/191388, specifically incorporated herein by reference. In an aspect, the Cas13b protein is selected from the group consisting of Porphyromonas gulae Cas13b (accession number WP 039434803), Prevotella sp. P5-125 Cas13b (accession number WP 044065294), Porphyromonas gingivalis Cas13b (accession number WP 053444417), Porphyromonas sp. COT-052 OH4946 Cas13b (accession number WP 039428968), Bacteroides pyogenes Cas13b (accession number WP 034542281), Riemerella anatipestifer Cas13b (accession number WP 004919755).

[0148] In certain example embodiments, the RNA-targeting effector protein is a Cas13c effector protein as disclosed in U.S. Provisional Patent Application No. 62/525,165 filed Jun. 26, 2017, and International Patent Publication No. WO2018/035250 filed Aug. 16, 2017. In certain example embodiments, the Cas13c protein may be from an organism of a genus such as Fusobacterium or Anaerosalibacter. Example wildtype orthologue sequences of Cas13c are: EH019081, WP_094899336, WP_040490876, WP_047396607, WP_035935671, WP_035906563, WP_042678931, WP_062627846, WP_005959231, WP_027128616, WP_062624740, WP_096402050.

[0149] In certain example embodiments, the Cas13 protein may be selected from any of the following: Cas13a: Leptotrichia shahii, Leptotrichia wadei (Lw2), Listeria seeligeri, Lachnospiraceae bacterium MA2020, Lachnospiraceae bacterium NK4A179, [Clostridium]aminophilum DSM 10710, Carnobacterium gallinarum DSM 4847, Carnobacterium gallinarum DSM 4847, Paludibacter propionicigenes WB4, Listeria weihenstephanensis FSL R9-0317, Listeriaceae bacterium FSL M6-0635, Leptotrichia wadei F0279, Rhodobacter capsulatus SB 1003, Rhodobacter capsulatus R121, Rhodobacter capsulatus DE442, Leptotrichia buccalis C-1013-b, Herbinix hemicellulosilytica, [Eubacterium] rectale, Eubacteriaceae bacterium CHKCI004, Blautia sp. Marseille-P2398, Leptotrichia sp. oral taxon 879 str. F0557; Cas13b: Bergeyella zoohelcum, Prevotella intermedia, Prevotella buccae, Alistipes sp. ZOR0009, Prevotella sp. MA2016, Riemerella anatipestifer, Prevotella aurantiaca, Prevotella saccharolytica, Prevotella intermedia, Capnocytophaga canimorsus, Porphyromonas gulae, Prevotella sp. P5-125, Flavobacterium branchiophilum, Porphyromonas gingivalis, Prevotella intermedia; Cas13c: Fusobacterium necrophorum subsp. funduliforme ATCC 51357 contig00003, Fusobacterium necrophorum DJ-2 contig0065, whole genome shotgun sequence, Fusobacterium necrophorum BFTR-1 contig0068, Fusobacterium necrophorum subsp. funduliforme 1_1_36S cont1.14, Fusobacterium perfoetens ATCC 29250 T364DRAFT_scaffold00009.9_C, Fusobacterium ulcerans ATCC 49185 cont2.38, Anaerosalibacter sp. ND1 genome assembly Anaerosalibacter massiliensis ND1.Cas13s non-specific RNase activity can be leveraged to cleave reporters upon target recognition, allowing for the design of sensitive and specific diagnostics using Cas13, including single nucleotide variants, detection based on rRNA sequences, screening for drug resistance, monitoring microbe outbreaks, genetic perturbations, and screening of environmental samples, as described, for example, in PCT/US18/054472 filed Oct. 22, 2018 at [0183]-[0327], incorporated herein by reference. Reference is made to WO 2017/219027, WO2018/107129, US20180298445, US 2018-0274017, US 2018-0305773, WO 2018/170340, U.S. application Ser. No. 15/922,837, filed Mar. 15, 2018 entitled “Devices for CRISPR Effector System Based Diagnostics”, PCT/US18/50091, filed Sep. 7, 2018 “Multi-Effector CRISPR Based Diagnostic Systems”, PCT/US18/66940 filed Dec. 20, 2018 entitled “CRISPR Effector System Based Multiplex Diagnostics”, PCT/US18/054472 filed Oct. 4, 2018 entitled “CRISPR Effector System Based Diagnostic”, U.S. Provisional 62/740,728 filed Oct. 3, 2018 entitled “CRISPR Effector System Based Diagnostics for Hemorrhagic Fever Detection”, U.S. Provisional 62/690,278 filed Jun. 26, 2018 and U.S. Provisional 62/767,059 filed Nov. 14, 2018 both entitled “CRISPR Double Nickase Based Amplification, Compositions, Systems and Methods”, U.S. Provisional 62/690,160 filed Jun. 26, 2018 and U.S. Pat. No. 62,767,077 filed Nov. 14, 2018, both entitled “CRISPR/CAS and Transposase Based Amplification Compositions, Systems, And Methods”, U.S. Provisional 62/690,257 filed Jun. 26, 2018 and 62/767,052 filed Nov. 14, 2018 both entitled “CRISPR Effector System Based Amplification Methods, Systems, And Diagnostics”, U.S. Provisional 62/767,076 filed Nov. 14, 2018 entitled “Multiplexing Highly Evolving Viral Variants With SHERLOCK” and 62/767,070 filed Nov. 14, 2018 entitled “Droplet SHERLOCK.” Reference is further made to WO2017/127807, WO2017/184786, WO 2017/184768, WO 2017/189308, WO 2018/035388, WO 2018/170333, WO 2018/191388, WO 2018/213708, WO 2019/005866, PCT/US18/67328 filed Dec. 21, 2018 entitled “Novel CRISPR Enzymes and Systems”, PCT/US18/67225 filed Dec. 21, 2018 entitled “Novel CRISPR Enzymes and Systems” and PCT/US18/67307 filed Dec. 21, 2018 entitled “Novel CRISPR Enzymes and Systems”, U.S. 62/712,809 filed Jul. 31, 2018 entitled “Novel CRISPR Enzymes and Systems”, U.S. 62/744,080 filed Oct. 10, 2018 entitled “Novel Cas12b Enzymes and Systems” and U.S. 62/751,196 filed Oct. 26, 2018 entitled “Novel Cas12b Enzymes and Systems”, U.S. 715,640 filed August 7, 2-18 entitled “Novel CRISPR Enzymes and Systems”, WO 2016/205711, U.S. Pat. No. 9,790,490, WO 2016/205749, WO 2016/205764, WO 2017/070605, WO 2017/106657, and WO 2016/149661, WO2018/035387, WO2018/194963, Cox DBT, et al., RNA editing with CRISPR-Cas13, Science. 2017 Nov. 24; 358(6366):1019-1027; Gootenberg J S, et al., Multiplexed and portable nucleic acid detection platform with Cas13, Cas12a, and Csm6, Science. 2018 Apr. 27; 360(6387):439-444; Gootenberg J S, et al., Nucleic acid detection with CRISPR-Cas13a/C2c2, Science. 2017 Apr. 28; 356(6336):438-442; Abudayyeh O O, et al., RNA targeting with CRISPR-Cas13, Nature. 2017 Oct. 12; 550(7675):280-284; Smargon A A, et al., Cas13b Is a Type VI-B CRISPR-Associated RNA-Guided RNase Differentially Regulated by Accessory Proteins Csx27 and Csx28. Mol Cell. 2017 Feb. 16; 65(4):618-630.e7; Abudayyeh 00, et al., C2c2 is a single-component programmable RNA-guided RNA-targeting CRISPR effector, Science. 2016 Aug. 5; 353(6299):aaf5573; Yang L, et al., Engineering and optimising deaminase fusions for genome editing. Nat Commun. 2016 Nov. 2; 7:13330, Myrvhold et al., Field deployable viral diagnostics using CRISPR-Cas13, Science 2018 360, 444-448, Shmakov et al. “Diversity and evolution of class 2 CRISPR-Cas systems,” Nat Rev Microbiol. 2017 15(3):169-182, each of which is incorporated herein by reference in its entirety.

### DNA-Targeting Effector Proteins

[0150] In certain example embodiments, the assays may comprise a DNA-targeting effector protein. In certain example embodiments, the assays may comprise multiple DNA-targeting effectors or one or more orthologs in combination with one or more RNA-targeting effectors. In certain example embodiments, the DNA targeting are Type V Cas proteins, such as Cas12 proteins. In certain other example embodiments, the Cas12 proteins are Cas12a, Cas12b, Cas12c, or a combination thereof.

[0151] Cas12a Orthologs

[0152] The present invention encompasses the use of a Cpf1 effector protein, derived from a Cpf1 locus denoted as subtype V-A. Herein such effector proteins are also referred to as “Cpf1p”, e.g., a Cpf1 protein (and such effector protein or Cpf1 protein or protein derived from a Cpf1 locus is also called “CRISPR enzyme”). Presently, the subtype V-A loci encompasses cas1, cas2, a distinct gene denoted cpf1 and a CRISPR array. Cpf1 (CRISPR-associated protein Cpf1, subtype PREFRAN) is a large protein (about 1300 amino acids) that contains a RuvC-like nuclease domain homologous to the corresponding domain of Cas9 along with a counterpart to the characteristic arginine-rich cluster of Cas9. However, Cpf1 lacks the HNH nuclease domain that is present in all Cas9 proteins, and the RuvC-like domain is contiguous in the Cpf1 sequence, in contrast to Cas9 where it contains long inserts including the HNH domain. Accordingly, in particular embodiments, the CRISPR-Cas enzyme comprises only a RuvC-like nuclease domain.

[0153] The programmability, specificity, and collateral activity of the RNA-guided Cpf1 also make it an ideal switchable nuclease for non-specific cleavage of nucleic acids. In one embodiment, a Cpf1 system is engineered to provide and take advantage of collateral non-specific cleavage of RNA. In another embodiment, a Cpf1 system is engineered to provide and take advantage of collateral non-specific cleavage of ssDNA. Accordingly, engineered Cpf1 systems provide platforms for nucleic acid detection and transcriptome manipulation. Cpf1 is developed for use as a mammalian transcript knockdown and binding tool. Cpf1 is capable of robust collateral cleavage of RNA and ssDNA when activated by sequence-specific targeted DNA binding.

[0154] Homologs and orthologs may be identified by homology modelling (see, e.g., Greer, Science vol. 228 (1985) 1055, and Blundell et al. Eur J Biochem vol 172 (1988), 513) or “structural BLAST” (Dey F, Cliff Zhang Q, Petrey D, Honig B. Toward a “structural BLAST”: using structural relationships to infer function. Protein Sci. 2013 April; 22(4):359-66. doi: 10.1002/pro.2225.). See also Shmakov et al. (2015) for application in the field of CRISPR-Cas loci. Homologous proteins may but need not be structurally related, or are only partially structurally related. The Cpf1 gene is found in several diverse bacterial genomes, typically in the same locus with cas1, cas2, and cas4 genes and a CRISPR cassette (for example, FNFX1_1431-FNFX1_1428 of Francisella cf. novicida Fxl). In particular embodiments, the effector protein is a Cpf1 effector protein from an organism from a genus comprising Streptococcus, Campylobacter, Nitratifractor, Staphylococcus, Parvibaculum, Roseburia, Neisseria, Gluconacetobacter, Azospirillum, Sphaerochaeta, Lactobacillus, Eubacterium, Corynebacter, Carnobacterium, Rhodobacter, Listeria, Paludibacter, Clostridium, Lachnospiraceae, Clostridiaridium, Leptotrichia, Francisella, Legionella, Alicyclobacillus, Methanomethyophilus, Porphyromonas, Prevotella, Bacteroidetes, Helcococcus, Letospira, Desulfovibrio, Desulfonatronum, Opitutaceae, Tuberibacillus, Bacillus, Brevibacilus, Methylobacterium or Acidaminococcus.

[0155] In further particular embodiments, the Cpf1 effector protein is from an organism selected from S. mutans, S. agalactiae, S. equisimilis, S. sanguinis, S. pneumonia; C. jejuni, C. coli; N. salsuginis, N. tergarcus; S. auricularis, S. carnosus; N. meningitides, N. gonorrhoeae; L. monocytogenes, L. ivanovii; C. botulinum, C. difficile, C. tetani, C. sordellii.

[0156] The effector protein may comprise a chimeric effector protein comprising a first fragment from a first effector protein (e.g., a Cpf1) ortholog and a second fragment from a second effector (e.g., a Cpf1) protein ortholog, and wherein the first and second effector protein orthologs are different. At least one of the first and second effector protein (e.g., a Cpf1) orthologs may comprise an effector protein (e.g., a Cpf1) from an organism comprising Streptococcus, Campylobacter, Nitratifractor, Staphylococcus, Parvibaculum, Roseburia, Neisseria, Gluconacetobacter, Azospirillum, Sphaerochaeta, Lactobacillus, Eubacterium, Corynebacter, Carnobacterium, Rhodobacter, Listeria, Paludibacter, Clostridium, Lachnospiraceae, Clostridiaridium, Leptotrichia, Francisella, Legionella, Alicyclobacillus, Methanomethyophilus, Porphyromonas, Prevotella, Bacteroidetes, Helcococcus, Letospira, Desulfovibrio, Desulfonatronum, Opitutaceae, Tuberibacillus, Bacillus, Brevibacilus, Methylobacterium or Acidaminococcus; e.g., a chimeric effector protein comprising a first fragment and a second fragment wherein each of the first and second fragments is selected from a Cpf1 of an organism comprising Streptococcus, Campylobacter, Nitratifractor, Staphylococcus, Parvibaculum, Roseburia, Neisseria, Gluconacetobacter, Azospirillum, Sphaerochaeta, Lactobacillus, Eubacterium, Corynebacter, Carnobacterium, Rhodobacter, Listeria, Paludibacter, Clostridium, Lachnospiraceae, Clostridiaridium, Leptotrichia, Francisella, Legionella, Alicyclobacillus, Methanomethyophilus, Porphyromonas, Prevotella, Bacteroidetes, Helcococcus, Letospira, Desulfovibrio, Desulfonatronum, Opitutaceae, Tuberibacillus, Bacillus, Brevibacilus, Methylobacterium or Acidaminococcus wherein the first and second fragments are not from the same bacteria; for instance a chimeric effector protein comprising a first fragment and a second fragment wherein each of the first and second fragments is selected from a Cpf1 of S. mutans, S. agalactiae, S. equisimilis, S. sanguinis, S. pneumonia; C. jejuni, C. coli; N. salsuginis, N. tergarcus; S. auricularis, S. carnosus; N. meningitides, N. gonorrhoeae; L. monocytogenes, L. ivanovii; C. botulinum, C. difficile, C. tetani, C. sordellii; Francisella tularensis 1, Prevotella albensis, Lachnospiraceae bacterium MC2017 1, Butyrivibrio proteoclasticus, Peregrinibacteria bacterium GW2011_GWA2_33_10, Parcubacteria bacterium GW2011_GWC2_44_17, Smithella sp. SCADC, Acidaminococcus sp. BV3L6, Lachnospiraceae bacterium MA2020, Candidatus Methanoplasma termitum, Eubacterium eligens, Moraxella bovoculi 237, Leptospira inadai, Lachnospiraceae bacterium ND2006, Porphyromonas crevioricanis 3, Prevotella disiens and Porphyromonas macacae, wherein the first and second fragments are not from the same bacteria. In a more preferred embodiment, the Cpf1p is derived from a bacterial species selected from Francisella tularensis 1, Prevotella albensis, Lachnospiraceae bacterium MC2017 1, Butyrivibrio proteoclasticus, Peregrinibacteria bacterium GW2011_GWA2_33_10, Parcubacteria bacterium GW2011_GWC2_44_17, Smithella sp. SCADC, Acidaminococcus sp. BV3L6, Lachnospiraceae bacterium MA2020, Candidatus Methanoplasma termitum, Eubacterium eligens, Moraxella bovoculi 237, Leptospira inadai, Lachnospiraceae bacterium ND2006, Porphyromonas crevioricanis 3, Prevotella disiens and Porphyromonas macacae. In certain embodiments, the Cpf1p is derived from a bacterial species selected from Acidaminococcus sp. BV3L6, Lachnospiraceae bacterium MA2020. In certain embodiments, the effector protein is derived from a subspecies of Francisella tularensis 1, including but not limited to Francisella tularensis subsp. Novicida.

[0157] In some embodiments, the Cpf1p is derived from an organism from the genus of Eubacterium. In some embodiments, the CRISPR effector protein is a Cpf1 protein derived from an organism from the bacterial species of Eubacterium rectale. In some embodiments, the amino acid sequence of the Cpf1 effector protein corresponds to NCBI Reference Sequence WP_055225123.1, NCBI Reference Sequence WP_055237260.1, NCBI Reference Sequence WP_055272206.1, or GenBank ID OLA16049.1. In some embodiments, the Cpf1 effector protein has a sequence homology or sequence identity of at least 60%, more particularly at least 70, such as at least 80%, more preferably at least 85%, even more preferably at least 90%, such as for instance at least 95%, with NCBI Reference Sequence WP_055225123.1, NCBI Reference Sequence WP_055237260.1, NCBI Reference Sequence WP_055272206.1, or GenBank ID OLA16049.1. The skilled person will understand that this includes truncated forms of the Cpf1 protein whereby the sequence identity is determined over the length of the truncated form. In some embodiments, the Cpf1 effector recognizes the PAM sequence of TTTN or CTTN.

[0158] In particular embodiments, the homologue or orthologue of Cpf1 as referred to herein has a sequence homology or identity of at least 80%, more preferably at least 85%, even more preferably at least 90%, such as for instance at least 95% with Cpf1. In further embodiments, the homologue or orthologue of Cpf1 as referred to herein has a sequence identity of at least 80%, more preferably at least 85%, even more preferably at least 90%, such as for instance at least 95% with the wild type Cpf1. Where the Cpf1 has one or more mutations (mutated), the homologue or orthologue of said Cpf1 as referred to herein has a sequence identity of at least 80%, more preferably at least 85%, even more preferably at least 90%, such as for instance at least 95% with the mutated Cpf1.

[0159] In an embodiment, the Cpf1 protein may be an ortholog of an organism of a genus which includes, but is not limited to Acidaminococcus sp, Lachnospiraceae bacterium or Moraxella bovoculi; in particular embodiments, the type V Cas protein may be an ortholog of an organism of a species which includes, but is not limited to Acidaminococcus sp. BV3L6; Lachnospiraceae bacterium ND2006 (LbCpf1) or Moraxella bovoculi 237. In particular embodiments, the homologue or orthologue of Cpf1 as referred to herein has a sequence homology or identity of at least 80%, more preferably at least 85%, even more preferably at least 90%, such as for instance at least 95% with one or more of the Cpf1 sequences disclosed herein. In further embodiments, the homologue or orthologue of Cpf as referred to herein has a sequence identity of at least 80%, more preferably at least 85%, even more preferably at least 90%, such as for instance at least 95% with the wild type FnCpf1, AsCpf1 or LbCpf1. The skilled person will understand that this includes truncated forms of the Cpf1 protein whereby the sequence identity is determined over the length of the truncated form. In certain of the following, Cpf1 amino acids are followed by nuclear localization signals (NLS) (italics), a glycine-serine (GS) linker, and 3×HA tag. Further Cpf1 orthologs include NCBI WP_055225123.1, NCBI WP_055237260.1, NCBI WP_055272206.1, and GenBank OLA16049.1.

[0160] Cas12b Orthologs

[0161] The present invention encompasses the use of a Cas12b (C2c1) effector proteins, derived from a C2c1 locus denoted as subtype V-B. Herein such effector proteins are also referred to as “C2c1p”, e.g., a C2c1 protein (and such effector protein or C2c1 protein or protein derived from a C2c1 locus is also called “CRISPR enzyme”). Presently, the subtype V-B loci encompasses cas1-Cas4 fusion, cas2, a distinct gene denoted C2c1 and a CRISPR array. C2c1 (CRISPR-associated protein C2c1) is a large protein (about 1100-1300 amino acids) that contains a RuvC-like nuclease domain homologous to the corresponding domain of Cas9 along with a counterpart to the characteristic arginine-rich cluster of Cas9. However, C2c1 lacks the HNH nuclease domain that is present in all Cas9 proteins, and the RuvC-like domain is contiguous in the C2c1 sequence, in contrast to Cas9 where it contains long inserts including the HNH domain. Accordingly, in particular embodiments, the CRISPR-Cas enzyme comprises only a RuvC-like nuclease domain.

[0162] The programmability, specificity, and collateral activity of the RNA-guided C2c1 also make it an ideal switchable nuclease for non-specific cleavage of nucleic acids. In one embodiment, a C2c1 system is engineered to provide and take advantage of collateral non-specific cleavage of RNA. In another embodiment, a C2c1 system is engineered to provide and take advantage of collateral non-specific cleavage of ssDNA. Accordingly, engineered C2c1 systems provide platforms for nucleic acid detection and transcriptome manipulation, and inducing cell death. C2c1 is developed for use as a mammalian transcript knockdown and binding tool. C2c1 is capable of robust collateral cleavage of RNA and ssDNA when activated by sequence-specific targeted DNA binding.

[0163] In certain embodiments, C2c1 is provided or expressed in an in vitro system or in a cell, transiently or stably, and targeted or triggered to non-specifically cleave cellular nucleic acids. In one embodiment, C2c1 is engineered to knock down ssDNA, for example viral ssDNA. In another embodiment, C2c1 is engineered to knock down RNA. The system can be devised such that the knockdown is dependent on a target DNA present in the cell or in vitro system, or triggered by the addition of a target nucleic acid to the system or cell.

[0164] C2c1 (also known as Cas12b) proteins are RNA guided nucleases. In certain embodiments, the Cas protein may comprise at least 80% sequence identity to a polypeptide as described in International Patent Publication WO 2016/205749 at FIG. 17-21, FIG. 41A-41M, 44A-44E, incorporated herein by reference. Its cleavage relies on a tracr RNA to recruit a guide RNA comprising a guide sequence and a direct repeat, where the guide sequence hybridizes with the target nucleotide sequence to form a DNA/RNA heteroduplex. Based on current studies, C2c1 nuclease activity also requires relies on recognition of PAM sequence. C2c1 PAM sequences are T-rich sequences. In some embodiments, the PAM sequence is 5′ TTN 3′ or 5′ ATTN 3′, wherein N is any nucleotide. In a particular embodiment, the PAM sequence is 5′ TTC 3′. In a particular embodiment, the PAM is in the sequence of Plasmodium falciparum.

[0165] In particular embodiments, the effector protein is a C2c1 effector protein from an organism from a genus comprising Alicyclobacillus, Desulfovibrio, Desulfonatronum, Opitutaceae, Tuberibacillus, Bacillus, Brevibacillus, Candidatus, Desulfatirhabdium, Citrobacter, Elusimicrobia, Methylobacterium, Omnitrophica, Phycisphaerae, Planctomycetes, Spirochaetes, and Verrucomicrobiaceae.

[0166] In further particular embodiments, the C2c1 effector protein is from a species selected from Alicyclobacillus acidoterrestris (e.g., ATCC 49025), Alicyclobacillus contaminans (e.g., DSM 17975), Alicyclobacillus macrosporangiidus (e.g. DSM 17980), Bacillus hisashii strain C4, Candidatus Lindowbacteria bacterium RIFCSPLOWO2, Desulfovibrio inopinatus (e.g., DSM 10711), Desulfonatronum thiodismutans (e.g., strain MLF-1), Elusimicrobia bacterium RIFOXYA12, Omnitrophica WOR_2 bacterium RIFCSPHIGHO2, Opitutaceae bacterium TAV5, Phycisphaerae bacterium ST-NAGAB-D1, Planctomycetes bacterium RBG_13_46_10, Spirochaetes bacterium GWB1_27_13, Verrucomicrobiaceae bacterium UBA2429, Tuberibacillus calidus (e.g., DSM 17572), Bacillus thermoamylovorans (e.g., strain B4166), Brevibacillus sp. CF112, Bacillus sp. NSP2.1, Desulfatirhabdium butyrativorans (e.g., DSM 18734), Alicyclobacillus herbarius (e.g., DSM 13609), Citrobacter freundii (e.g., ATCC 8090), Brevibacillus agri (e.g., BAB-2500), Methylobacterium nodulans (e.g., ORS 2060).

[0167] The effector protein may comprise a chimeric effector protein comprising a first fragment from a first effector protein (e.g., a C2c1) ortholog and a second fragment from a second effector (e.g., a C2c1) protein ortholog, and wherein the first and second effector protein orthologs are different. At least one of the first and second effector protein (e.g., a C2c1) orthologs may comprise an effector protein (e.g., a C2c1) from an organism comprising Alicyclobacillus, Desulfovibrio, Desulfonatronum, Opitutaceae, Tuberibacillus, Bacillus, Brevibacillus, Candidatus, Desulfatirhabdium, Elusimicrobia, Citrobacter, Methylobacterium, Omnitrophicai, Phycisphaerae, Planctomycetes, Spirochaetes, and Verrucomicrobiaceae; e.g., a chimeric effector protein comprising a first fragment and a second fragment wherein each of the first and second fragments is selected from a C2c1 of an organism comprising Alicyclobacillus, Desulfovibrio, Desulfonatronum, Opitutaceae, Tuberibacillus, Bacillus, Brevibacillus, Candidatus, Desulfatirhabdium, Elusimicrobia, Citrobacter, Methylobacterium, Omnitrophicai, Phycisphaerae, Planctomycetes, Spirochaetes, and Verrucomicrobiaceae wherein the first and second fragments are not from the same bacteria; for instance a chimeric effector protein comprising a first fragment and a second fragment wherein each of the first and second fragments is selected from a C2c1 of Alicyclobacillus acidoterrestris (e.g., ATCC 49025), Alicyclobacillus contaminans (e.g., DSM 17975), Alicyclobacillus macrosporangiidus (e.g. DSM 17980), Bacillus hisashii strain C4, Candidatus Lindowbacteria bacterium RIFCSPLOWO2, Desulfovibrio inopinatus (e.g., DSM 10711), Desulfonatronum thiodismutans (e.g., strain MLF-1), Elusimicrobia bacterium RIFOXYA12, Omnitrophica WOR_2 bacterium RIFCSPHIGHO2, Opitutaceae bacterium TAV5, Phycisphaerae bacterium ST-NAGAB-D1, Planctomycetes bacterium RBG_13_46_10, Spirochaetes bacterium GWB1_27_13, Verrucomicrobiaceae bacterium UBA2429, Tuberibacillus calidus (e.g., DSM 17572), Bacillus thermoamylovorans (e.g., strain B4166), Brevibacillus sp. CF112, Bacillus sp. NSP2.1, Desulfatirhabdium butyrativorans (e.g., DSM 18734), Alicyclobacillus herbarius (e.g., DSM 13609), Citrobacter freundii (e.g., ATCC 8090), Brevibacillus agri (e.g., BAB-2500), Methylobacterium nodulans (e.g., ORS 2060), wherein the first and second fragments are not from the same bacteria.

[0168] In a more preferred embodiment, the C2c1p is derived from a bacterial species selected from Alicyclobacillus acidoterrestris (e.g., ATCC 49025), Alicyclobacillus contaminans (e.g., DSM 17975), Alicyclobacillus macrosporangiidus (e.g. DSM 17980), Bacillus hisashii strain C4, Candidatus Lindowbacteria bacterium RIFCSPLOWO2, Desulfovibrio inopinatus (e.g., DSM 10711), Desulfonatronum thiodismutans (e.g., strain MLF-1), Elusimicrobia bacterium RIFOXYA12, Omnitrophica WOR_2 bacterium RIFCSPHIGHO2, Opitutaceae bacterium TAV5, Phycisphaerae bacterium ST-NAGAB-D1, Planctomycetes bacterium RBG_13_46_10, Spirochaetes bacterium GWB1_27_13, Verrucomicrobiaceae bacterium UBA2429, Tuberibacillus calidus (e.g., DSM 17572), Bacillus thermoamylovorans (e.g., strain B4166), Brevibacillus sp. CF112, Bacillus sp. NSP2.1, Desulfatirhabdium butyrativorans (e.g., DSM 18734), Alicyclobacillus herbarius (e.g., DSM 13609), Citrobacter freundii (e.g., ATCC 8090), Brevibacillus agri (e.g., BAB-2500), Methylobacterium nodulans (e.g., ORS 2060). In certain embodiments, the C2c1p is derived from a bacterial species selected from Alicyclobacillus acidoterrestris (e.g., ATCC 49025), Alicyclobacillus contaminans (e.g., DSM 17975).

[0169] In particular embodiments, the homologue or orthologue of C2c1 as referred to herein has a sequence homology or identity of at least 80%, more preferably at least 85%, even more preferably at least 90%, such as for instance at least 95% with C2c1. In further embodiments, the homologue or orthologue of C2c1 as referred to herein has a sequence identity of at least 80%, more preferably at least 85%, even more preferably at least 90%, such as for instance at least 95% with the wild type C2c1. Where the C2c1 has one or more mutations (mutated), the homologue or orthologue of said C2c1 as referred to herein has a sequence identity of at least 80%, more preferably at least 85%, even more preferably at least 90%, such as for instance at least 95% with the mutated C2c1.

[0170] In an embodiment, the C2c1 protein may be an ortholog of an organism of a genus which includes, but is not limited to Alicyclobacillus, Desulfovibrio, Desulfonatronum, Opitutaceae, Tuberibacillus, Bacillus, Brevibacillus, Candidatus, Desulfatirhabdium, Elusimicrobia, Citrobacter, Methylobacterium, Omnitrophicai, Phycisphaerae, Planctomycetes, Spirochaetes, and Verrucomicrobiaceae; in particular embodiments, the type V Cas protein may be an ortholog of an organism of a species which includes, but is not limited to Alicyclobacillus acidoterrestris (e.g., ATCC 49025), Alicyclobacillus contaminans (e.g., DSM 17975), Alicyclobacillus macrosporangiidus (e.g. DSM 17980), Bacillus hisashii strain C4, Candidatus Lindowbacteria bacterium RIFCSPLOWO2, Desulfovibrio inopinatus (e.g., DSM 10711), Desulfonatronum thiodismutans (e.g., strain MLF-1), Elusimicrobia bacterium RIFOXYA12, Omnitrophica WOR_2 bacterium RIFCSPHIGHO2, Opitutaceae bacterium TAV5, Phycisphaerae bacterium ST-NAGAB-D1, Planctomycetes bacterium RBG_13_46_10, Spirochaetes bacterium GWB1_27_13, Verrucomicrobiaceae bacterium UBA2429, Tuberibacillus calidus (e.g., DSM 17572), Bacillus thermoamylovorans (e.g., strain B4166), Brevibacillus sp. CF112, Bacillus sp. NSP2.1, Desulfatirhabdium butyrativorans (e.g., DSM 18734), Alicyclobacillus herbarius (e.g., DSM 13609), Citrobacter freundii (e.g., ATCC 8090), Brevibacillus agri (e.g., BAB-2500), Methylobacterium nodulans (e.g., ORS 2060). In particular embodiments, the homologue or orthologue of C2c1 as referred to herein has a sequence homology or identity of at least 80%, more preferably at least 85%, even more preferably at least 90%, such as for instance at least 95% with one or more of the C2c1 sequences disclosed herein. In further embodiments, the homologue or orthologue of C2c1 as referred to herein has a sequence identity of at least 80%, more preferably at least 85%, even more preferably at least 90%, such as for instance at least 95% with the wild type AacC2c1 or BthC2c1.

[0171] In particular embodiments, the C2c1 protein of the invention has a sequence homology or identity of at least 60%, more particularly at least 70, such as at least 80%, more preferably at least 85%, even more preferably at least 90%, such as for instance at least 95% with AacC2c1 or BthC2c1. In further embodiments, the C2c1 protein as referred to herein has a sequence identity of at least 60%, such as at least 70%, more particularly at least 80%, more preferably at least 85%, even more preferably at least 90%, such as for instance at least 95% with the wild type AacC2c1. In particular embodiments, the C2c1 protein of the present invention has less than 60% sequence identity with AacC2c1. The skilled person will understand that this includes truncated forms of the C2c1 protein whereby the sequence identity is determined over the length of the truncated form.

[0172] In certain methods according to the present invention, the CRISPR-Cas protein is preferably mutated with respect to a corresponding wild-type enzyme such that the mutated CRISPR-Cas protein lacks the ability to cleave one or both DNA strands of a target locus containing a target sequence. In particular embodiments, one or more catalytic domains of the C2c1 protein are mutated to produce a mutated Cas protein which cleaves only one DNA strand of a target sequence.

[0173] In particular embodiments, the CRISPR-Cas protein may be mutated with respect to a corresponding wild-type enzyme such that the mutated CRISPR-Cas protein lacks substantially all DNA cleavage activity. In some embodiments, a CRISPR-Cas protein may be considered to substantially lack all DNA and/or RNA cleavage activity when the cleavage activity of the mutated enzyme is about no more than 25%, 10%, 5%, 1%, 0.1%, 0.01%, or less of the nucleic acid cleavage activity of the non-mutated form of the enzyme; an example can be when the nucleic acid cleavage activity of the mutated form is nil or negligible as compared with the non-mutated form.

[0174] In certain embodiments of the methods provided herein the CRISPR-Cas protein is a mutated CRISPR-Cas protein which cleaves only one DNA strand, i.e. a nickase. More particularly, in the context of the present invention, the nickase ensures cleavage within the non-target sequence, i.e. the sequence which is on the opposite DNA strand of the target sequence and which is 3′ of the PAM sequence. By means of further guidance, and without limitation, an arginine-to-alanine substitution (R911A) in the Nuc domain of C2c1 from Alicyclobacillus acidoterrestris converts C2c1 from a nuclease that cleaves both strands to a nickase (cleaves a single strand). It will be understood by the skilled person that where the enzyme is not AacC2c1, a mutation may be made at a residue in a corresponding position.

### Cas12c Orthologs

[0175] In certain embodiments, the effector protein, particularly a Type V loci effector protein, more particularly a Type V-C loci effector protein, a Cas12c protein, even more particularly a C2c3p, may originate, may be isolated or may be derived from a bacterial metagenome selected from the group consisting of the bacterial metagenomes listed in the Table in FIG. 43A-43B of PCT/US2016/038238, specifically incorporated by reference, which presents analysis of the Type-V-C Cas12c loci.

[0176] In certain embodiments, the effector protein, particularly a Type V loci effector protein, more particularly a Type V-C loci effector protein, even more particularly a C2c3p, may comprise, consist essentially of or consist of an amino acid sequence selected from the group consisting of amino acid sequences shown in the multiple sequence alignment in FIG. 13I of PCT/US2016/038238, specifically incorporated by reference.

[0177] In certain embodiments, a Type V-C locus as intended herein may encode Cas1 and the C2c3p effector protein. See FIG. 14 of PCT/US2016/038238, specifically incorporated by reference, depicting the genomic architecture of the Cas12c CRISPR-Cas loci. In certain embodiments, a Cas1 protein encoded by a Type V-C locus as intended herein may cluster with Type I-B system. See FIGS. 10A and 10B and FIG. 10C-V of PCT/US2016/038238, specifically incorporated by reference, illustrating a Cas1 tree including Cas1 encoded by representative Type V-C loci.

[0178] In certain embodiments, the effector protein, particularly a Type V loci effector protein, more particularly a Type V-C loci effector protein, even more particularly a C2c3p, such as a native C2c3p, may be about 1100 to about 1500 amino acids long, e.g., about 1100 to about 1200 amino acids long, or about 1200 to about 1300 amino acids long, or about 1300 to about 1400 amino acids long, or about 1400 to about 1500 amino acids long, e.g., about 1100, about 1200, about 1300, about 1400 or about 1500 amino acids long, or at least about 1100, at least about 1200, at least about 1300, at least about 1400 or at least about 1500 amino acids long.

[0179] In certain embodiments, the effector protein, particularly a Type V loci effector protein, more particularly a Type V-C loci effector protein, even more particularly a C2c3p, and preferably the C-terminal portion of said effector protein, comprises the three catalytic motifs of the RuvC-like nuclease (i.e., RuvCI, RuvCII and RuvCIII). In certain embodiments, said effector protein, and preferably the C-terminal portion of said effector protein, may further comprise a region corresponding to the bridge helix (also known as arginine-rich cluster) that in Cas9 protein is involved in crRNA-binding. In certain embodiments, said effector protein, and preferably the C-terminal portion of said effector protein, may further comprise a Zn finger region. Preferably, the Zn-binding cysteine residue(s) may be conserved in C2c3p. In certain embodiments, said effector protein, and preferably the C-terminal portion of said effector protein, may comprise the three catalytic motifs of the RuvC-like nuclease (i.e., RuvCI, RuvCII and RuvCIII), the region corresponding to the bridge helix, and the Zn finger region, preferably in the following order, from N to C terminus: RuvCI-bridge helix-RuvCII-Zinc finger-RuvCIII. See FIGS. 13A and 13C of PCT/US2016/038238, specifically incorporated by reference, for illustration of representative Type V-C effector proteins domain architecture.

[0180] In certain embodiments, Type V-C loci as intended herein may comprise CRISPR repeats between 20 and 30 bp long, more typically between 22 and 27 bp long, yet more typically 25 bp long, e.g., 20, 21, 22, 23, 24, 25, 26, 27, 28, 29, or 30 bp long.

[0181] Orthologous proteins may but need not be structurally related, or are only partially structurally related. In particular embodiments, the homologue or orthologue of a Type V protein such as Cas12c as referred to herein has a sequence homology or identity of at least 80%, more preferably at least 85%, even more preferably at least 90%, such as for instance at least 95% with a Cas12c. In further embodiments, the homologue or orthologue of a Type V Cas12c as referred to herein has a sequence identity of at least 80%, more preferably at least 85%, even more preferably at least 90%, such as for instance at least 95% with the wild type Cas12c.

[0182] In an embodiment, the Type V RNA-targeting Cas protein may be a Cas12c ortholog of an organism of a genus which includes but is not limited to Corynebacter, Sutterella, Legionella, Treponema, Filifactor, Eubacterium, Streptococcus, Lactobacillus, Mycoplasma, Bacteroides, Flaviivola, Flavobacterium, Sphaerochaeta, Azospirillum, Gluconacetobacter, Neisseria, Roseburia, Parvibaculum, Staphylococcus, Nitratifractor, Mycoplasma and Campylobacter.

In an embodiment, the Cas12c or an ortholog or homolog thereof, may comprise one or more mutations (and hence nucleic acid molecule(s) coding for same may have mutation(s). The mutations may be artificially introduced mutations and may include but are not limited to one or more mutations in a catalytic domain. Examples of catalytic domains with reference to a Cas enzyme may include but are not limited to RuvC I, RuvC II, RuvC III, HNH domains, and HEPN domains, as described herein. In an embodiment, the Cas12c or an ortholog or homolog thereof, may comprise one or more mutations. The mutations may be artificially introduced mutations and may include but are not limited to one or more mutations in a catalytic domain. Guide Sequences

[0183] As used herein, the term “guide sequence” and “guide molecule” in the context of a CRISPR-Cas system, comprises any polynucleotide sequence having sufficient complementarity with a target nucleic acid sequence to hybridize with the target nucleic acid sequence and direct sequence-specific binding of a nucleic acid-targeting complex to the target nucleic acid sequence. The guide sequences made using the methods disclosed herein may be a full-length guide sequence, a truncated guide sequence, a full-length sgRNA sequence, a truncated sgRNA sequence, or an E+F sgRNA sequence. In some embodiments, the degree of complementarity of the guide sequence to a given target sequence, when optimally aligned using a suitable alignment algorithm, is about or more than about 50%, 60%, 75%, 80%, 85%, 90%, 95%, 97.5%, 99%, or more. In certain example embodiments, the guide molecule comprises a guide sequence that may be designed to have at least one mismatch with the target sequence, such that a RNA duplex formed between the guide sequence and the target sequence. Accordingly, the degree of complementarity is preferably less than 99%. For instance, where the guide sequence consists of 24 nucleotides, the degree of complementarity is more particularly about 96% or less. In particular embodiments, the guide sequence is designed to have a stretch of two or more adjacent mismatching nucleotides, such that the degree of complementarity over the entire guide sequence is further reduced. For instance, where the guide sequence consists of 24 nucleotides, the degree of complementarity is more particularly about 96% or less, more particularly, about 92% or less, more particularly about 88% or less, more particularly about 84% or less, more particularly about 80% or less, more particularly about 76% or less, more particularly about 72% or less, depending on whether the stretch of two or more mismatching nucleotides encompasses 2, 3, 4, 5, 6 or 7 nucleotides, etc. In some embodiments, aside from the stretch of one or more mismatching nucleotides, the degree of complementarity, when optimally aligned using a suitable alignment algorithm, is about or more than about 50%, 60%, 75%, 80%, 85%, 90%, 95%, 97.5%, 99%, or more. Optimal alignment may be determined with the use of any suitable algorithm for aligning sequences, non-limiting example of which include the Smith-Waterman algorithm, the Needleman-Wunsch algorithm, algorithms based on the Burrows-Wheeler Transform (e.g., the Burrows Wheeler Aligner), ClustalW, Clustal X, BLAT, Novoalign (Novocraft Technologies; available at www.novocraft.com), ELAND (Illumina, San Diego, Calif.), SOAP (available at soap.genomics.org.cn), and Maq (available at maq.sourceforge.net). The ability of a guide sequence (within a nucleic acid-targeting guide RNA) to direct sequence-specific binding of a nucleic acid-targeting complex to a target nucleic acid sequence may be assessed by any suitable assay. For example, the components of a nucleic acid-targeting CRISPR system sufficient to form a nucleic acid-targeting complex, including the guide sequence to be tested, may be provided to a host cell having the corresponding target nucleic acid sequence, such as by transfection with vectors encoding the components of the nucleic acid-targeting complex, followed by an assessment of preferential targeting (e.g., cleavage) within the target nucleic acid sequence, such as by Surveyor assay as described herein. Similarly, cleavage of a target nucleic acid sequence (or a sequence in the vicinity thereof) may be evaluated in a test tube by providing the target nucleic acid sequence, components of a nucleic acid-targeting complex, including the guide sequence to be tested and a control guide sequence different from the test guide sequence, and comparing binding or rate of cleavage at or in the vicinity of the target sequence between the test and control guide sequence reactions. Other assays are possible, and will occur to those skilled in the art. A guide sequence, and hence a nucleic acid-targeting guide RNA may be selected to target any target nucleic acid sequence.

[0184] As used herein, the term “guide sequence,” “crRNA,” “guide RNA,” or “single guide RNA,” or “gRNA” refers to a polynucleotide comprising any polynucleotide sequence having sufficient complementarity with a target nucleic acid sequence to hybridize with the target nucleic acid sequence and to direct sequence-specific binding of a RNA-targeting complex comprising the guide sequence and a CRISPR effector protein to the target nucleic acid sequence. In some example embodiments, the degree of complementarity, when optimally aligned using a suitable alignment algorithm, is about or more than about 50%, 60%, 75%, 80%, 85%, 90%, 95%, 97.5%, 99%, or more. Optimal alignment may be determined with the use of any suitable algorithm for aligning sequences, non-limiting example of which include the Smith-Waterman algorithm, the Needleman-Wunsch algorithm, algorithms based on the Burrows-Wheeler Transform (e.g., the Burrows Wheeler Aligner), ClustalW, Clustal X, BLAT, Novoalign (Novocraft Technologies; available at www.novocraft.com), ELAND (Illumina, San Diego, Calif.), SOAP (available at soap.genomics.org.cn), and Maq (available at maq.sourceforge.net). The ability of a guide sequence (within a nucleic acid-targeting guide RNA) to direct sequence-specific binding of a nucleic acid-targeting complex to a target nucleic acid sequence may be assessed by any suitable assay. For example, the components of a nucleic acid-targeting CRISPR system sufficient to form a nucleic acid-targeting complex, including the guide sequence to be tested, may be provided to a host cell having the corresponding target nucleic acid sequence, such as by transfection with vectors encoding the components of the nucleic acid-targeting complex, followed by an assessment of preferential targeting (e.g., cleavage) within the target nucleic acid sequence, such as by Surveyor assay as described herein. Similarly, cleavage of a target nucleic acid sequence may be evaluated in a test tube by providing the target nucleic acid sequence, components of a nucleic acid-targeting complex, including the guide sequence to be tested and a control guide sequence different from the test guide sequence, and comparing binding or rate of cleavage at the target sequence between the test and control guide sequence reactions. Other assays are possible, and will occur to those skilled in the art. A guide sequence, and hence a nucleic acid-targeting guide may be selected to target any target nucleic acid sequence. The target sequence may be DNA. The target sequence may be any RNA sequence. In some embodiments, the target sequence may be a sequence within a RNA molecule selected from the group consisting of messenger RNA (mRNA), pre-mRNA, ribosomal RNA (rRNA), transfer RNA (tRNA), micro-RNA (miRNA), small interfering RNA (siRNA), small nuclear RNA (snRNA), small nucleolar RNA (snoRNA), double stranded RNA (dsRNA), non-coding RNA (ncRNA), long non-coding RNA (lncRNA), and small cytoplasmatic RNA (scRNA). In some preferred embodiments, the target sequence may be a sequence within a RNA molecule selected from the group consisting of mRNA, pre-mRNA, and rRNA. In some preferred embodiments, the target sequence may be a sequence within a RNA molecule selected from the group consisting of ncRNA, and lncRNA. In some more preferred embodiments, the target sequence may be a sequence within an mRNA molecule or a pre-mRNA molecule.

[0185] In certain embodiments, the guide sequence or spacer length of the guide molecules is from 15 to 50 nt. In certain embodiments, the spacer length of the guide RNA is at least 15 nucleotides. In certain embodiments, the spacer length is from 15 to 17 nt, e.g., 15, 16, or 17 nt, from 17 to 20 nt, e.g., 17, 18, 19, or 20 nt, from 20 to 24 nt, e.g., 20, 21, 22, 23, or 24 nt, from 23 to 25 nt, e.g., 23, 24, or 25 nt, from 24 to 27 nt, e.g., 24, 25, 26, or 27 nt, from 27-30 nt, e.g., 27, 28, 29, or 30 nt, from 30-35 nt, e.g., 30, 31, 32, 33, 34, or 35 nt, or 35 nt or longer. In certain example embodiment, the guide sequence is 15, 16, 17, 18, 19, 20, 21, 22, 23, 24, 25, 26, 27, 28, 29, 30, 31, 32, 33, 34, 35, 36, 37, 38, 39 40, 41, 42, 43, 44, 45, 46, 47 48, 49, 50, 51, 52, 53, 54, 55, 56, 57, 58, 59, 60, 61, 62, 63, 64, 65, 66, 67, 68, 69, 70, 71, 72, 73, 74, 75, 76, 77, 78, 79, 80, 81, 82, 83, 84, 85, 86, 87, 88, 89, 90, 91, 92, 93, 94, 95, 96, 97, 98, 99, or 100 nt.

[0186] In some embodiments, the sequence of the guide molecule (direct repeat and/or spacer) is selected to reduce the degree secondary structure within the guide molecule. In some embodiments, about or less than about 75%, 50%, 40%, 30%, 25%, 20%, 15%, 10%, 5%, 1%, or fewer of the nucleotides of the nucleic acid-targeting guide RNA participate in self-complementary base pairing when optimally folded. Optimal folding may be determined by any suitable polynucleotide folding algorithm. Some programs are based on calculating the minimal Gibbs free energy. An example of one such algorithm is mFold, as described by Zuker and Stiegler (Nucleic Acids Res. 9 (1981), 133-148). Another example folding algorithm is the online webserver RNAfold, developed at Institute for Theoretical Chemistry at the University of Vienna, using the centroid structure prediction algorithm (see e.g., A. R. Gruber et al., 2008, Cell 106(1): 23-24; and PA Carr and GM Church, 2009, Nature Biotechnology 27(12): 1151-62).

[0187] In some embodiments, it is of interest to reduce the susceptibility of the guide molecule to RNA cleavage, such as to cleavage by Cas13. Accordingly, in particular embodiments, the guide molecule is adjusted to avoide cleavage by Cas13 or other RNA-cleaving enzymes.

[0188] In certain embodiments, the guide molecule comprises non-naturally occurring nucleic acids and/or non-naturally occurring nucleotides and/or nucleotide analogs, and/or chemically modifications. Preferably, these non-naturally occurring nucleic acids and non-naturally occurring nucleotides are located outside the guide sequence. Non-naturally occurring nucleic acids can include, for example, mixtures of naturally and non-naturally occurring nucleotides. Non-naturally occurring nucleotides and/or nucleotide analogs may be modified at the ribose, phosphate, and/or base moiety. In an embodiment of the invention, a guide nucleic acid comprises ribonucleotides and non-ribonucleotides. In one such embodiment, a guide comprises one or more ribonucleotides and one or more deoxyribonucleotides. In an embodiment of the invention, the guide comprises one or more non-naturally occurring nucleotide or nucleotide analog such as a nucleotide with phosphorothioate linkage, a locked nucleic acid (LNA) nucleotides comprising a methylene bridge between the 2′ and 4′ carbons of the ribose ring, or bridged nucleic acids (BNA). Other examples of modified nucleotides include 2′-O-methyl analogs, 2′-deoxy analogs, or 2′-fluoro analogs. Further examples of modified bases include, but are not limited to, 2-aminopurine, 5-bromo-uridine, pseudouridine, inosine, 7-methylguanosine. Examples of guide RNA chemical modifications include, without limitation, incorporation of 2′-O-methyl (M), 2′-O-methyl 3′phosphorothioate (MS), S-constrained ethyl(cEt), or 2′-O-methyl 3′thioPACE (MSP) at one or more terminal nucleotides. Such chemically modified guides can comprise increased stability and increased activity as compared to unmodified guides, though on-target vs. off-target specificity is not predictable. (See, Hendel, 2015, Nat Biotechnol. 33(9):985-9, doi: 10.1038/nbt.3290, published online 29 Jun. 2015 Ragdarm et al., 0215, PNAS, E7110-E7111; Allerson et al., J. Med. Chem. 2005, 48:901-904; Bramsen et al., Front. Genet., 2012, 3:154; Deng et al., PNAS, 2015, 112:11870-11875; Sharma et al., MedChemComm., 2014, 5:1454-1471; Hendel et al., Nat. Biotechnol. (2015) 33(9): 985-989; Li et al., Nature Biomedical Engineering, 2017, 1, 0066 DOI:10.1038/s41551-017-0066). In some embodiments, the 5′ and/or 3′ end of a guide RNA is modified by a variety of functional moieties including fluorescent dyes, polyethylene glycol, cholesterol, proteins, or detection tags. (See Kelly et al., 2016, J. Biotech. 233:74-83). In certain embodiments, a guide comprises ribonucleotides in a region that binds to a target RNA and one or more deoxyribonucletides and/or nucleotide analogs in a region that binds to Cas13. In an embodiment of the invention, deoxyribonucleotides and/or nucleotide analogs are incorporated in engineered guide structures, such as, without limitation, stem-loop regions, and the seed region. For Cas13 guide, in certain embodiments, the modification is not in the 5′-handle of the stem-loop regions. Chemical modification in the 5′-handle of the stem-loop region of a guide may abolish its function (see Li, et al., Nature Biomedical Engineering, 2017, 1:0066). In certain embodiments, at least 1, 2, 3, 4, 5, 6, 7, 8, 9, 10, 11, 12, 13, 14, 15, 16, 17, 18, 19, 20, 21, 22, 23, 24, 25, 26, 27, 28, 29, 30, 35, 40, 45, 50, or 75 nucleotides of a guide is chemically modified. In some embodiments, 3-5 nucleotides at either the 3′ or the 5′ end of a guide is chemically modified. In some embodiments, only minor modifications are introduced in the seed region, such as 2′-F modifications. In some embodiments, 2′-F modification is introduced at the 3′ end of a guide. In certain embodiments, three to five nucleotides at the 5′ and/or the 3′ end of the guide are chemically modified with 2′-O-methyl (M), 2′-O-methyl 3′ phosphorothioate (MS), S-constrained ethyl(cEt), or 2′-O-methyl 3′ thioPACE (MSP). Such modification can enhance genome editing efficiency (see Hendel et al., Nat. Biotechnol. (2015) 33(9): 985-989). In certain embodiments, all of the phosphodiester bonds of a guide are substituted with phosphorothioates (PS) for enhancing levels of gene disruption. In certain embodiments, more than five nucleotides at the 5′ and/or the 3′ end of the guide are chemicially modified with 2′-O-Me, 2′-F or S-constrained ethyl(cEt). Such chemically modified guide can mediate enhanced levels of gene disruption (see Ragdarm et al., 0215, PNAS, E7110-E7111). In an embodiment of the invention, a guide is modified to comprise a chemical moiety at its 3′ and/or 5′ end. Such moieties include, but are not limited to amine, azide, alkyne, thio, dibenzocyclooctyne (DBCO), or Rhodamine. In certain embodiment, the chemical moiety is conjugated to the guide by a linker, such as an alkyl chain. In certain embodiments, the chemical moiety of the modified guide can be used to attach the guide to another molecule, such as DNA, RNA, protein, or nanoparticles. Such chemically modified guide can be used to identify or enrich cells generically edited by a CRISPR system (see Lee et al., eLife, 2017, 6:e25312, DOI:10.7554).

[0189] In some embodiments, a nucleic acid-targeting guide is selected to reduce the degree secondary structure within the nucleic acid-targeting guide. In some embodiments, about or less than about 75%, 50%, 40%, 30%, 25%, 20%, 15%, 10%, 5%, 1%, or fewer of the nucleotides of the nucleic acid-targeting guide participate in self-complementary base pairing when optimally folded. Optimal folding may be determined by any suitable polynucleotide folding algorithm. Some programs are based on calculating the minimal Gibbs free energy. An example of one such algorithm is mFold, as described by Zuker and Stiegler (Nucleic Acids Res. 9 (1981), 133-148). Another example folding algorithm is the online webserver RNAfold, developed at Institute for Theoretical Chemistry at the University of Vienna, using the centroid structure prediction algorithm (see e.g., A. R. Gruber et al., 2008, Cell 106(1): 23-24; and PA Carr and GM Church, 2009, Nature Biotechnology 27(12): 1151-62).

[0190] In some embodiments, a nucleic acid-targeting guide is designed or selected to modulate intermolecular interactions among guide molecules, such as among stem-loop regions of different guide molecules. It will be appreciated that nucleotides within a guide that base-pair to form a stem-loop are also capable of base-pairing to form an intermolecular duplex with a second guide and that such an intermolecular duplex would not have a secondary structure compatible with CRISPR complex formation. Accordingly, is useful to select or design DR sequences in order to modulate stem-loop formation and CRISPR complex formation. In some embodiments, about or less than about 75%, 50%, 40%, 30%, 25%, 20%, 15%, 10%, 5%, 1%, or fewer of nucleic acid-targeting guides are in intermolecular duplexes. It will be appreciated that stem-loop variation will often be within limits imposed by DR-CRISPR effector interactions. One way to modulate stem-loop formation or change the equilibrium between stem-loop and intermolecular duplex is to vary nucleotide pairs in the stem of the stem-loop of a DR. For example, in one embodiment, a G-C pair is replaced by an A-U or U-A pair. In another embodiment, an A-U pair is substituted for a G-C or a C-G pair. In another embodiment, a naturally occurring nucleotide is replaced by a nucleotide analog. Another way to modulate stem-loop formation or change the equilibrium between stem-loop and intermolecular duplex is to modify the loop of the stem-loop of a DR. Without be bound by theory, the loop can be viewed as an intervening sequence flanked by two sequences that are complementary to each other. When that intervening sequence is not self-complementary, its effect will be to destabilize intermolecular duplex formation. The same principle applies when guides are multiplexed: while the targeting sequences may differ, it may be advantageous to modify the stem-loop region in the DRs of the different guides. Moreover, when guides are multiplexed, the relative activities of the different guides can be modulated by balancing the activity of each individual guide. In certain embodiments, the equilibrium between intermolecular stem-loops vs. intermolecular duplexes is determined. The determination may be made by physical or biochemical means and can be in the presence or absence of a CRISPR effector.

[0191] In certain embodiments, a guide RNA or crRNA may comprise, consist essentially of, or consist of a direct repeat (DR) sequence and a guide sequence or spacer sequence. In certain embodiments, the guide RNA or crRNA may comprise, consist essentially of, or consist of a direct repeat sequence fused or linked to a guide sequence or spacer sequence. In certain embodiments, the direct repeat sequence may be located upstream (i.e., 5′) from the guide sequence or spacer sequence. In other embodiments, the direct repeat sequence may be located downstream (i.e., 3′) from the guide sequence or spacer sequence.

[0192] In certain embodiments, the crRNA comprises a stem loop, preferably a single stem loop. In certain embodiments, the direct repeat sequence forms a stem loop, preferably a single stem loop.

[0193] In certain embodiments, the spacer length of the guide RNA is from 15 to 35 nt. In certain embodiments, the spacer length of the guide RNA is at least 15 nucleotides. In certain embodiments, the spacer length is from 15 to 17 nt, e.g., 15, 16, or 17 nt, from 17 to 20 nt, e.g., 17, 18, 19, or 20 nt, from 20 to 24 nt, e.g., 20, 21, 22, 23, or 24 nt, from 23 to 25 nt, e.g., 23, 24, or 25 nt, from 24 to 27 nt, e.g., 24, 25, 26, or 27 nt, from 27-30 nt, e.g., 27, 28, 29, or 30 nt, from 30-35 nt, e.g., 30, 31, 32, 33, 34, or 35 nt, or 35 nt or longer.

[0194] In general, the CRISPR-Cas, CRISPR-Cas9 or CRISPR system may be as used in the foregoing documents, such as WO 2014/093622 (PCT/US2013/074667) and refers collectively to transcripts and other elements involved in the expression of or directing the activity of CRISPR-associated (“Cas”) genes, including sequences encoding a Cas gene, in particular a Cas9 gene in the case of CRISPR-Cas9, a tracr (trans-activating CRISPR) sequence (e.g. tracrRNA or an active partial tracrRNA), a tracr-mate sequence (encompassing a “direct repeat” and a tracrRNA-processed partial direct repeat in the context of an endogenous CRISPR system), a guide sequence (also referred to as a “spacer” in the context of an endogenous CRISPR system), or “RNA(s)” as that term is herein used (e.g., RNA(s) to guide Cas9, e.g. CRISPR RNA and transactivating (tracr) RNA or a single guide RNA (sgRNA) (chimeric RNA)) or other sequences and transcripts from a CRISPR locus. In general, a CRISPR system is characterized by elements that promote the formation of a CRISPR complex at the site of a target sequence (also referred to as a protospacer in the context of an endogenous CRISPR system). In the context of formation of a CRISPR complex, “target sequence” refers to a sequence to which a guide sequence is designed to have complementarity, where hybridization between a target sequence and a guide sequence promotes the formation of a CRISPR complex. The section of the guide sequence through which complementarity to the target sequence is important for cleavage activity is referred to herein as the seed sequence. A target sequence may comprise any polynucleotide, such as DNA or RNA polynucleotides. In some embodiments, a target sequence is located in the nucleus or cytoplasm of a cell, and may include nucleic acids in or from mitochondrial, organelles, vesicles, liposomes or particles present within the cell. In some embodiments, especially for non-nuclear uses, NLSs are not preferred. In some embodiments, a CRISPR system comprises one or more nuclear exports signals (NESs). In some embodiments, a CRISPR system comprises one or more NLSs and one or more NESs. In some embodiments, direct repeats may be identified in silico by searching for repetitive motifs that fulfill any or all of the following criteria: 1. found in a 2 Kb window of genomic sequence flanking the type II CRISPR locus; 2. span from 20 to 50 bp; and 3. interspaced by 20 to 50 bp. In some embodiments, 2 of these criteria may be used, for instance 1 and 2, 2 and 3, or 1 and 3. In some embodiments, all 3 criteria may be used.

[0195] In embodiments of the invention the terms guide sequence and guide RNA, i.e. RNA capable of guiding Cas to a target genomic locus, are used interchangeably as in foregoing cited documents such as WO 2014/093622 (PCT/US2013/074667). In general, a guide sequence is any polynucleotide sequence having sufficient complementarity with a target polynucleotide sequence to hybridize with the target sequence and direct sequence-specific binding of a CRISPR complex to the target sequence. In some embodiments, the degree of complementarity between a guide sequence and its corresponding target sequence, when optimally aligned using a suitable alignment algorithm, is about or more than about 50%, 60%, 75%, 80%, 85%, 90%, 95%, 97.5%, 99%, or more. Optimal alignment may be determined with the use of any suitable algorithm for aligning sequences, non-limiting example of which include the Smith-Waterman algorithm, the Needleman-Wunsch algorithm, algorithms based on the Burrows-Wheeler Transform (e.g. the Burrows Wheeler Aligner), ClustalW, Clustal X, BLAT, Novoalign (Novocraft Technologies; available at www.novocraft.com), ELAND (Illumina, San Diego, Calif.), SOAP (available at soap.genomics.org.cn), and Maq (available at maq.sourceforge.net). In some embodiments, a guide sequence is about or more than about 5, 10, 11, 12, 13, 14, 15, 16, 17, 18, 19, 20, 21, 22, 23, 24, 25, 26, 27, 28, 29, 30, 35, 40, 45, 50, 75, or more nucleotides in length. In some embodiments, a guide sequence is less than about 75, 50, 45, 40, 35, 30, 25, 20, 15, 12, or fewer nucleotides in length. Preferably the guide sequence is 10 30 nucleotides long. The ability of a guide sequence to direct sequence-specific binding of a CRISPR complex to a target sequence may be assessed by any suitable assay. For example, the components of a CRISPR system sufficient to form a CRISPR complex, including the guide sequence to be tested, may be provided to a host cell having the corresponding target sequence, such as by transfection with vectors encoding the components of the CRISPR sequence, followed by an assessment of preferential cleavage within the target sequence, such as by Surveyor assay as described herein. Similarly, cleavage of a target polynucleotide sequence may be evaluated in a test tube by providing the target sequence, components of a CRISPR complex, including the guide sequence to be tested and a control guide sequence different from the test guide sequence, and comparing binding or rate of cleavage at the target sequence between the test and control guide sequence reactions. Other assays are possible, and will occur to those skilled in the art.

[0196] In some embodiments of CRISPR-Cas systems, the degree of complementarity between a guide sequence and its corresponding target sequence can be about or more than about 50%, 60%, 75%, 80%, 85%, 90%, 95%, 97.5%, 99%, or 100%; a guide or RNA or sgRNA can be about or more than about 5, 10, 11, 12, 13, 14, 15, 16, 17, 18, 19, 20, 21, 22, 23, 24, 25, 26, 27, 28, 29, 30, 35, 40, 45, 50, 75, or more nucleotides in length; or guide or RNA or sgRNA can be less than about 75, 50, 45, 40, 35, 30, 25, 20, 15, 12, or fewer nucleotides in length; and advantageously tracr RNA is 30 or 50 nucleotides in length. However, an aspect of the invention is to reduce off-target interactions, e.g., reduce the guide interacting with a target sequence having low complementarity. Indeed, in the examples, it is shown that the invention involves mutations that result in the CRISPR-Cas system being able to distinguish between target and off-target sequences that have greater than 80% to about 95% complementarity, e.g., 83%-84% or 88-89% or 94-95% complementarity (for instance, distinguishing between a target having 18 nucleotides from an off-target of 18 nucleotides having 1, 2 or 3 mismatches). Accordingly, in the context of the present invention the degree of complementarity between a guide sequence and its corresponding target sequence is greater than 94.5% or 95% or 95.5% or 96% or 96.5% or 97% or 97.5% or 98% or 98.5% or 99% or 99.5% or 99.9%, or 100%. Off target is less than 100% or 99.9% or 99.5% or 99% or 99% or 98.5% or 98% or 97.5% or 97% or 96.5% or 96% or 95.5% or 95% or 94.5% or 94% or 93% or 92% or 91% or 90% or 89% or 88% or 87% or 86% or 85% or 84% or 83% or 82% or 81% or 80% complementarity between the sequence and the guide, with it advantageous that off target is 100% or 99.9% or 99.5% or 99% or 99% or 98.5% or 98% or 97.5% or 97% or 96.5% or 96% or 95.5% or 95% or 94.5% complementarity between the sequence and the guide.

### Multiplexing Polynucleotides

[0197] Provided herein are engineered polynucleotide sequences that can direct the activity of a CRISPR protein to multiple targets using a single crRNA. The engineered polynucleotide sequences, also referred to as a multiplexing polynucleotides, can include two or more direct repeats interspersed with two or more guide sequences. More specifically, the engineered polynucleotide sequences can include a direct repeat sequence having one or more mutations relative to the corresponding wild type direct repeat sequence. The engineered polynucleotide can be configured, for example, as: 5′ DR1-G1-DR2-G2 3′. In some embodiments, the engineered polynucleotide can be configured to include three, four, five, or more additional direct repeat and guide sequences, for example: 5′ DR1-G1-DR2-G2-DR3-G3 3′, 5″ DR1-G1-DR2-G2-DR3-G3-DR4-G4 3′, or 5′ DR1-G1-DR2-G2-DR3-G3-DR4-G4-DR5-G5 3′.

[0198] Regardless of the number of direct repeat sequences, the direct repeat sequences differ from one another. Thus, DR1 can be a wild type sequence and DR2 can include one or more mutations relative to the wild type sequence in accordance with the disclosure provided herein regarding direct repeats for Cas orthologs. The guide sequences can also be the same or different. In some embodiments, the guide sequences can bind to different nucleic acid targets, for example, nucleic acids encoding different polypeptides. The multiplexing polynucleotides can be as described, for example, at [0039]-[0072] in U.S. Application 62/780,748 entitled “CRISPR Cpf1 Directe Repeat Variants” and filed Dec. 17, 2018, incorporated herein in its entirety by reference.

### Guide Modifications

[0199] In certain embodiments, guides of the invention comprise non-naturally occurring nucleic acids and/or non-naturally occurring nucleotides and/or nucleotide analogs, and/or chemical modifications. Non-naturally occurring nucleic acids can include, for example, mixtures of naturally and non-naturally occurring nucleotides. Non-naturally occurring nucleotides and/or nucleotide analogs may be modified at the ribose, phosphate, and/or base moiety. In an embodiment of the invention, a guide nucleic acid comprises ribonucleotides and non-ribonucleotides. In one such embodiment, a guide comprises one or more ribonucleotides and one or more deoxyribonucleotides. In an embodiment of the invention, the guide comprises one or more non-naturally occurring nucleotide or nucleotide analog such as a nucleotide with phosphorothioate linkage, boranophosphate linkage, a locked nucleic acid (LNA) nucleotides comprising a methylene bridge between the 2′ and 4′ carbons of the ribose ring, or bridged nucleic acids (BNA). Other examples of modified nucleotides include 2′-O-methyl analogs, 2′-deoxy analogs, 2-thiouridine analogs, N6-methyladenosine analogs, or 2′-fluoro analogs. Further examples of modified bases include, but are not limited to, 2-aminopurine, 5-bromo-uridine, pseudouridine (Ψ), N1-methylpseudouridine (me1Ψ), 5-methoxyuridine(5moU), inosine, 7-methylguanosine. Examples of guide RNA chemical modifications include, without limitation, incorporation of 2′-O-methyl (M), 2′-O-methyl-3′-phosphorothioate (MS), phosphorothioate (PS), S-constrained ethyl(cEt), or 2′-O-methyl-3′-thioPACE (MSP) at one or more terminal nucleotides. Such chemically modified guides can comprise increased stability and increased activity as compared to unmodified guides, though on-target vs. off-target specificity is not predictable. (See, Hendel, 2015, Nat Biotechnol. 33(9):985-9, doi: 10.1038/nbt.3290, published online 29 Jun. 2015; Ragdarm et al., 0215, PNAS, E7110-E7111; Allerson et al., J. Med. Chem. 2005, 48:901-904; Bramsen et al., Front. Genet., 2012, 3:154; Deng et al., PNAS, 2015, 112:11870-11875; Sharma et al., MedChemComm., 2014, 5:1454-1471; Hendel et al., Nat. Biotechnol. (2015) 33(9): 985-989; Li et al., Nature Biomedical Engineering, 2017, 1, 0066 DOI:10.1038/s41551-017-0066). In some embodiments, the 5′ and/or 3′ end of a guide RNA is modified by a variety of functional moieties including fluorescent dyes, polyethylene glycol, cholesterol, proteins, or detection tags. (See Kelly et al., 2016, J. Biotech. 233:74-83). In certain embodiments, a guide comprises ribonucleotides in a region that binds to a target DNA and one or more deoxyribonucleotides and/or nucleotide analogs in a region that binds to Cas9, Cpf1, or C2c1. In an embodiment of the invention, deoxyribonucleotides and/or nucleotide analogs are incorporated in engineered guide structures, such as, without limitation, 5′ and/or 3′ end, stem-loop regions, and the seed region. In certain embodiments, the modification is not in the 5′-handle of the stem-loop regions. Chemical modification in the 5′-handle of the stem-loop region of a guide may abolish its function (see Li, et al., Nature Biomedical Engineering, 2017, 1:0066). In certain embodiments, at least 1, 2, 3, 4, 5, 6, 7, 8, 9, 10, 11, 12, 13, 14, 15, 16, 17, 18, 19, 20, 21, 22, 23, 24, 25, 26, 27, 28, 29, 30, 35, 40, 45, 50, or 75 nucleotides of a guide is chemically modified. In some embodiments, 3-5 nucleotides at either the 3′ or the 5′ end of a guide is chemically modified. In some embodiments, only minor modifications are introduced in the seed region, such as 2′-F modifications. In some embodiments, 2′-F modification is introduced at the 3′ end of a guide. In certain embodiments, three to five nucleotides at the 5′ and/or the 3′ end of the guide are chemically modified with 2′-O-methyl (M), 2′-O-methyl-3′-phosphorothioate (MS), S-constrained ethyl(cEt), or 2′-O-methyl-3′-thioPACE (MSP). Such modification can enhance genome editing efficiency (see Hendel et al., Nat. Biotechnol. (2015) 33(9): 985-989). In certain embodiments, all of the phosphodiester bonds of a guide are substituted with phosphorothioates (PS) for enhancing levels of gene disruption. In certain embodiments, more than five nucleotides at the 5′ and/or the 3′ end of the guide are chemically modified with 2′-O-Me, 2′-F or S-constrained ethyl(cEt). Such chemically modified guide can mediate enhanced levels of gene disruption (see Ragdarm et al., 0215, PNAS, E7110-E7111). In an embodiment of the invention, a guide is modified to comprise a chemical moiety at its 3′ and/or 5′ end. Such moieties include, but are not limited to amine, azide, alkyne, thio, dibenzocyclooctyne (DBCO), or Rhodamine. In certain embodiment, the chemical moiety is conjugated to the guide by a linker, such as an alkyl chain. In certain embodiments, the chemical moiety of the modified guide can be used to attach the guide to another molecule, such as DNA, RNA, protein, or nanoparticles. Such chemically modified guide can be used to identify or enrich cells generically edited by a CRISPR system (see Lee et al., eLife, 2017, 6:e25312, DOI:10.7554).

[0200] In certain embodiments, the CRISPR system as provided herein can make use of a crRNA or analogous polynucleotide comprising a guide sequence, wherein the polynucleotide is an RNA, a DNA or a mixture of RNA and DNA, and/or wherein the polynucleotide comprises one or more nucleotide analogs. The sequence can comprise any structure, including but not limited to a structure of a native crRNA, such as a bulge, a hairpin or a stem loop structure. In certain embodiments, the polynucleotide comprising the guide sequence forms a duplex with a second polynucleotide sequence which can be an RNA or a DNA sequence.

[0201] In certain embodiments, use is made of chemically modified guide RNAs. Examples of guide RNA chemical modifications include, without limitation, incorporation of 2′-O-methyl (M), 2′-O-methyl 3′phosphorothioate (MS), or 2′-O-methyl 3′thioPACE (MSP) at one or more terminal nucleotides. Such chemically modified guide RNAs can comprise increased stability and increased activity as compared to unmodified guide RNAs, though on-target vs. off-target specificity is not predictable. (See, Hendel, 2015, Nat Biotechnol. 33(9):985-9, doi: 10.1038/nbt.3290, published online 29 Jun. 2015). Chemically modified guide RNAs further include, without limitation, RNAs with phosphorothioate linkages and locked nucleic acid (LNA) nucleotides comprising a methylene bridge between the 2′ and 4′ carbons of the ribose ring.

[0202] In some embodiments, a guide sequence is about or more than about 5, 10, 11, 12, 13, 14, 15, 16, 17, 18, 19, 20, 21, 22, 23, 24, 25, 26, 27, 28, 29, 30, 35, 40, 45, 50, 75, or more nucleotides in length. In some embodiments, a guide sequence is less than about 75, 50, 45, 40, 35, 30, 25, 20, 15, 12, or fewer nucleotides in length. Preferably the guide sequence is 10 to 30 nucleotides long. The ability of a guide sequence to direct sequence-specific binding of a CRISPR complex to a target sequence may be assessed by any suitable assay. For example, the components of a CRISPR system sufficient to form a CRISPR complex, including the guide sequence to be tested, may be provided to a host cell having the corresponding target sequence, such as by transfection with vectors encoding the components of the CRISPR sequence, followed by an assessment of preferential cleavage within the target sequence, such as by Surveyor assay. Similarly, cleavage of a target RNA may be evaluated in a test tube by providing the target sequence, components of a CRISPR complex, including the guide sequence to be tested and a control guide sequence different from the test guide sequence, and comparing binding or rate of cleavage at the target sequence between the test and control guide sequence reactions. Other assays are possible, and will occur to those skilled in the art.

[0203] In some embodiments, the modification to the guide is a chemical modification, an insertion, a deletion or a split. In some embodiments, the chemical modification includes, but is not limited to, incorporation of 2′-O-methyl (M) analogs, 2′-deoxy analogs, 2-thiouridine analogs, N6-methyladenosine analogs, 2′-fluoro analogs, 2-aminopurine, 5-bromo-uridine, pseudouridine (Ψ), N1-methylpseudouridine (me1Ψ), 5-methoxyuridine(5moU), inosine, 7-methylguanosine, 2′-O-methyl-3′-phosphorothioate (MS), S-constrained ethyl(cEt), phosphorothioate (PS), or 2′-O-methyl-3′-thioPACE (MSP). In some embodiments, the guide comprises one or more of phosphorothioate modifications. In certain embodiments, at least 1, 2, 3, 4, 5, 6, 7, 8, 9, 10, 11, 12, 13, 14, 15, 16, 17, 18, 19, 20, or 25 nucleotides of the guide are chemically modified. In certain embodiments, one or more nucleotides in the seed region are chemically modified. In certain embodiments, one or more nucleotides in the 3′-terminus are chemically modified. In certain embodiments, none of the nucleotides in the 5′-handle is chemically modified. In some embodiments, the chemical modification in the seed region is a minor modification, such as incorporation of a 2′-fluoro analog. In a specific embodiment, one nucleotide of the seed region is replaced with a 2′-fluoro analog. In some embodiments, 5 or 10 nucleotides in the 3′-terminus are chemically modified. Such chemical modifications at the 3′-terminus of the Cpf1 CrRNA improve gene cutting efficiency (see Li, et al., Nature Biomedical Engineering, 2017, 1:0066). In a specific embodiment, 5 nucleotides in the 3′-terminus are replaced with 2′-fluoro analogues. In a specific embodiment, 10 nucleotides in the 3′-terminus are replaced with 2′-fluoro analogues. In a specific embodiment, 5 nucleotides in the 3′-terminus are replaced with 2′-O-methyl (M) analogs.

[0204] In some embodiments, the loop of the 5′-handle of the guide is modified. In some embodiments, the loop of the 5′-handle of the guide is modified to have a deletion, an insertion, a split, or chemical modifications. In certain embodiments, the loop comprises 3, 4, or 5 nucleotides. In certain embodiments, the loop comprises the sequence of UCUU, UUUU, UAUU, or UGUU.

[0205] A guide sequence, and hence a nucleic acid-targeting guide RNA may be selected to target any target nucleic acid sequence. In the context of formation of a CRISPR complex, “target sequence” refers to a sequence to which a guide sequence is designed to have complementarity, where hybridization between a target sequence and a guide sequence promotes the formation of a CRISPR complex. A target sequence may comprise RNA polynucleotides. The term “target RNA” refers to a RNA polynucleotide being or comprising the target sequence. In other words, the target RNA may be a RNA polynucleotide or a part of a RNA polynucleotide to which a part of the gRNA, i.e. the guide sequence, is designed to have complementarity and to which the effector function mediated by the complex comprising CRISPR effector protein and a gRNA is to be directed. In some embodiments, a target sequence is located in the nucleus or cytoplasm of a cell. The target sequence may be DNA. The target sequence may be any RNA sequence. In some embodiments, the target sequence may be a sequence within a RNA molecule selected from the group consisting of messenger RNA (mRNA), pre-mRNA, ribosomal RNA (rRNA), transfer RNA (tRNA), micro-RNA (miRNA), small interfering RNA (siRNA), small nuclear RNA (snRNA), small nuclear RNA (snoRNA), double stranded RNA (dsRNA), non coding RNA (ncRNA), long non-coding RNA (lncRNA), and small cytoplasmic RNA (scRNA). In some preferred embodiments, the target sequence may be a sequence within a RNA molecule selected from the group consisting of mRNA, pre-mRNA, and rRNA. In some preferred embodiments, the target sequence may be a sequence within a RNA molecule selected from the group consisting of ncRNA, and lncRNA. In some more preferred embodiments, the target sequence may be a sequence within an mRNA molecule or a pre-mRNA molecule.

[0206] In certain embodiments, the spacer length of the guide RNA is less than 28 nucleotides. In certain embodiments, the spacer length of the guide RNA is at least 18 nucleotides and less than 28 nucleotides. In certain embodiments, the spacer length of the guide RNA is between 19 and 28 nucleotides. In certain embodiments, the spacer length of the guide RNA is between 19 and 25 nucleotides. In certain embodiments, the spacer length of the guide RNA is 20 nucleotides. In certain embodiments, the spacer length of the guide RNA is 23 nucleotides. In certain embodiments, the spacer length of the guide RNA is 25 nucleotides.

[0207] In certain embodiments, modulations of cleavage efficiency can be exploited by introduction of mismatches, e.g. 1 or more mismatches, such as 1 or 2 mismatches between spacer sequence and target sequence, including the position of the mismatch along the spacer/target. The more central (i.e. not 3′ or 5′) for instance a double mismatch is, the more cleavage efficiency is affected. Accordingly, by choosing mismatch position along the spacer, cleavage efficiency can be modulated. By means of example, if less than 100% cleavage of targets is desired (e.g. in a cell population), 1 or more, such as preferably 2 mismatches between spacer and target sequence may be introduced in the spacer sequences. The more central along the spacer of the mismatch position, the lower the cleavage percentage.

[0208] In certain example embodiments, the cleavage efficiency may be exploited to design single guides that can distinguish two or more targets that vary by a single nucleotide, such as a single nucleotide polymorphism (SNP), variation, or (point) mutation. The CRISPR effector may have reduced sensitivity to SNPs (or other single nucleotide variations) and continue to cleave SNP targets with a certain level of efficiency. Thus, for two targets, or a set of targets, a guide RNA may be designed with a nucleotide sequence that is complementary to one of the targets i.e. the on-target SNP. The guide RNA is further designed to have a synthetic mismatch. As used herein a “synthetic mismatch” refers to a non-naturally occurring mismatch that is introduced upstream or downstream of the naturally occurring SNP, such as at most 5 nucleotides upstream or downstream, for instance 4, 3, 2, or 1 nucleotide upstream or downstream, preferably at most 3 nucleotides upstream or downstream, more preferably at most 2 nucleotides upstream or downstream, most preferably 1 nucleotide upstream or downstream (i.e. adjacent the SNP). When the CRISPR effector binds to the on-target SNP, only a single mismatch will be formed with the synthetic mismatch and the CRISPR effector will continue to be activated and a detectable signal produced. When the guide RNA hybridizes to an off-target SNP, two mismatches will be formed, the mismatch from the SNP and the synthetic mismatch, and no detectable signal generated. Thus, the systems disclosed herein may be designed to distinguish SNPs within a population. For, example the systems may be used to distinguish pathogenic strains that differ by a single SNP or detect certain disease specific SNPs, such as but not limited to, disease associated SNPs, such as without limitation cancer associated SNPs.

[0209] In certain embodiments, the guide RNA is designed such that the SNP is located on position 1, 2, 3, 4, 5, 6, 7, 8, 9, 10, 11, 12, 13, 14, 15, 16, 17, 18, 19, 20, 21, 22, 23, 24, 25, 26, 27, 28, 29, or 30 of the spacer sequence (starting at the 5′ end). In certain embodiments, the guide RNA is designed such that the SNP is located on position 1, 2, 3, 4, 5, 6, 7, 8, or 9 of the spacer sequence (starting at the 5′ end). In certain embodiments, the guide RNA is designed such that the SNP is located on position 2, 3, 4, 5, 6, or 7 of the spacer sequence (starting at the 5′ end). In certain embodiments, the guide RNA is designed such that the SNP is located on position 3, 4, 5, or 6 of the spacer sequence (starting at the 5′ end). In certain embodiments, the guide RNA is designed such that the SNP is located on position 3 of the spacer sequence (starting at the 5′ end).

[0210] In certain embodiments, the guide RNA is designed such that the mismatch (e.g. the synthetic mismatch, i.e. an additional mutation besides a SNP) is located on position 1, 2, 3, 4, 5, 6, 7, 8, 9, 10, 11, 12, 13, 14, 15, 16, 17, 18, 19, 20, 21, 22, 23, 24, 25, 26, 27, 28, 29, or 30 of the spacer sequence (starting at the 5′ end). In certain embodiments, the guide RNA is designed such that the mismatch is located on position 1, 2, 3, 4, 5, 6, 7, 8, or 9 of the spacer sequence (starting at the 5′ end). In certain embodiments, the guide RNA is designed such that the mismatch is located on position 4, 5, 6, or 7 of the spacer sequence (starting at the 5′ end. In certain embodiments, the guide RNA is designed such that the mismatch is located at position 3, 4, 5, or 6 of the spacer, preferably position 3. In certain embodiments, the guide RNA is designed such that the mismatch is located on position 5 of the spacer sequence (starting at the 5′ end).

[0211] In certain embodiments, said mismatch is 1, 2, 3, 4, or 5 nucleotides upstream or downstream, preferably 2 nucleotides, preferably downstream of said SNP or other single nucleotide variation in said guide RNA.

[0212] In certain embodiments, the guide RNA is designed such that the mismatch is located 2 nucleotides upstream of the SNP (i.e. one intervening nucleotide).

[0213] In certain embodiments, the guide RNA is designed such that the mismatch is located 2 nucleotides downstream of the SNP (i.e. one intervening nucleotide).

[0214] In certain embodiments, the guide RNA is designed such that the mismatch is located on position 5 of the spacer sequence (starting at the 5′ end) and the SNP is located on position 3 of the spacer sequence (starting at the 5′ end).

[0215] In certain embodiments, the guide RNA comprises a spacer which is truncated relative to a wild type spacer. In certain embodiments, the guide RNA comprises a spacer which comprises less than 28 nucleotides, preferably between and including 20 to 27 nucleotides.

[0216] In certain embodiments, the guide RNA comprises a spacer which consists of 20-25 nucleotides or 20-23 nucleotides, such as preferably 20 or 23 nucleotides.

[0217] In certain embodiments, the one or more guide RNAs are designed to detect a single nucleotide polymorphism in a target RNA or DNA, or a splice variant of an RNA transcript.

[0218] In certain embodiments, the one or more guide RNAs may be designed to bind to one or more target molecules that are diagnostic for a disease state. In some embodiments, the disease may be cancer. In some embodiments, the disease state may be an autoimmune disease. In some embodiments, the disease state may be an infection. In some embodiments, the infection may be caused by a virus, a bacterium, a fungus, a protozoa, or a parasite. In specific embodiments, the infection is a viral infection. In specific embodiments, the viral infection is caused by a DNA virus.

[0219] The embodiments described herein comprehend inducing one or more nucleotide modifications in a eukaryotic cell (in vitro, i.e. in an isolated eukaryotic cell) as herein discussed comprising delivering to cell a vector as herein discussed. The mutation(s) can include the introduction, deletion, or substitution of one or more nucleotides at each target sequence of cell(s) via the guide(s) RNA(s). The mutations can include the introduction, deletion, or substitution of 1-75 nucleotides at each target sequence of said cell(s) via the guide(s) RNA(s). The mutations can include the introduction, deletion, or substitution of 1, 5, 10, 11, 12, 13, 14, 15, 16, 17, 18, 19, 20, 21, 22, 23, 24, 25, 26, 27, 28, 29, 30, 35, 40, 45, 50, or 75 nucleotides at each target sequence of said cell(s) via the guide(s) RNA(s). The mutations can include the introduction, deletion, or substitution of 5, 10, 11, 12, 13, 14, 15, 16, 17, 18, 19, 20, 21, 22, 23, 24, 25, 26, 27, 28, 29, 30, 35, 40, 45, 50, or 75 nucleotides at each target sequence of said cell(s) via the guide(s) RNA(s). The mutations include the introduction, deletion, or substitution of 10, 11, 12, 13, 14, 15, 16, 17, 18, 19, 20, 21, 22, 23, 24, 25, 26, 27, 28, 29, 30, 35, 40, 45, 50, or 75 nucleotides at each target sequence of said cell(s) via the guide(s) RNA(s). The mutations can include the introduction, deletion, or substitution of 20, 21, 22, 23, 24, 25, 26, 27, 28, 29, 30, 35, 40, 45, 50, or 75 nucleotides at each target sequence of said cell(s) via the guide(s) RNA(s). The mutations can include the introduction, deletion, or substitution of 40, 45, 50, 75, 100, 200, 300, 400 or 500 nucleotides at each target sequence of said cell(s) via the guide(s) RNA(s).

[0220] Typically, in the context of an endogenous CRISPR system, formation of a CRISPR complex (comprising a guide sequence hybridized to a target sequence and complexed with one or more Cas proteins) results in cleavage in or near (e.g. within 1, 2, 3, 4, 5, 6, 7, 8, 9, 10, 20, 50, or more base pairs from) the target sequence, but may depend on for instance secondary structure, in particular in the case of RNA targets.

[0221] Example orthologs include Alicyclobacillus macrosporangiidus strain DSM 17980, Bacillus hisashii strain C4, Candidatus Lindowbacteria bacterium RIFCSPLOWO2, Elusimicrobia bacterium RIFOXYA12, Omnitrophica WOR_2 bacterium RIFCSPHIGHO2, Phycisphaerae bacterium ST-NAGAB-D1, Planctomycetes bacterium RBG_13_46_10, Spirochaetes bacterium GWB1_27_13, Verrucomicrobiaceae bacterium UBA2429.

### Samples

[0222] Samples to be screened are loaded at the sample loading portion of the lateral flow substrate. The samples must be liquid samples or samples dissolved in an appropriate solvent, usually aqueous. The liquid sample reconstitutes the SHERLOCK reagents such that a SHERLOCK reaction can occur. The liquid sample begins to flow from the sample portion of the substrate towards the first and second capture regions.

[0223] A sample for use with the invention may be a biological or environmental sample, such as a surface sample, a fluid sample, or a food sample (fresh fruits or vegetables, meats). Food samples may include a beverage sample, a paper surface, a fabric surface, a metal surface, a wood surface, a plastic surface, a soil sample, a freshwater sample, a wastewater sample, a saline water sample, exposure to atmospheric air or other gas sample, or a combination thereof. For example, household/commercial/industrial surfaces made of any materials including, but not limited to, metal, wood, plastic, rubber, or the like, may be swabbed and tested for contaminants. Soil samples may be tested for the presence of pathogenic bacteria or parasites, or other microbes, both for environmental purposes and/or for human, animal, or plant disease testing. Water samples such as freshwater samples, wastewater samples, or saline water samples can be evaluated for cleanliness and safety, and/or potability, to detect the presence of, for example, Cryptosporidium parvum, Giardia lamblia, or other microbial contamination. In further embodiments, a biological sample may be obtained from a source including, but not limited to, a tissue sample, saliva, blood, plasma, sera, stool, urine, sputum, mucous, lymph, synovial fluid, spinal fluid, cerebrospinal fluid, ascites, pleural effusion, seroma, pus, bile, aqueous or vitreous humor, transudate, exudate, or swab of skin or a mucosal membrane surface. In some particular embodiments, an environmental sample or biological samples may be crude samples and/or the one or more target molecules may not be purified or amplified from the sample prior to application of the method. Identification of microbes may be useful and/or needed for any number of applications, and thus any type of sample from any source deemed appropriate by one of skill in the art may be used in accordance with the invention.

Methods for Detecting and/or Quantifying Target Nucleic Acids

[0224] In some embodiments, the invention provides methods for detecting target nucleic acids in a sample. Such methods may comprise contacting a sample with the first end of a lateral flow device as described herein. The first end of the lateral flow device may comprise a sample loading portion, wherein the sample flows from the sample loading portion of the substrate towards the first and second capture regions and generates a detectable signal.

[0225] A positive detectable signal may be any signal that can be detected using optical, fluorescent, chemiluminescent, electrochemical or other detection methods known in the art, as described elsewhere herein.

[0226] In some embodiments, the lateral flow device may be capable of detecting two different target nucleic acid sequences. In some embodiments, this detection of two different target nucleic acid sequences may occur simultaneously.

[0227] In some embodiments, the absence of target nucleic acid sequences in a sample elicits a detectable fluorescent signal at each capture region. In such instances, the absence of any target nucleic acid sequences in a sample may cause a detectable signal to appear at the first and second capture regions.

[0228] In some embodiments, the lateral flow device as described herein is capable of detecting three different target nucleic acid sequences. In specific embodiments, when the target nucleic acid sequences are absent from the sample, a fluorescent signal may be generated at each of the three capture regions. In such exemplary embodiments, a fluorescent signal may be absent at the capture region for the corresponding target nucleic acid sequence when the sample contains one or more target nucleic acid sequences.

[0229] Samples to be screened are loaded at the sample loading portion of the lateral flow substrate. The samples must be liquid samples or samples dissolved in an appropriate solvent, usually aqueous. The liquid sample reconstitutes the system reagents such that a SHERLOCK reaction can occur. Intact reporter construct is bound at the first capture region by binding between the first binding agent and the first molecule. Likewise, the detection agent will begin to collect at the first binding region by binding to the second molecule on the intact reporter construct. If target molecule(s) are present in the sample, the CRISPR effector protein collateral effect is activated. As activated CRISPR effector protein comes into contact with the bound reporter construct, the reporter constructs are cleaved, releasing the second molecule to flow further down the lateral flow substrate towards the second binding region. The released second molecule is then captured at the second capture region by binding to the second binding agent, where additional detection agent may also accumulate by binding to the second molecule. Accordingly, if the target molecule(s) is not present in the sample, a detectable signal will appear at the first capture region, and if the target molecule(s) is present in the sample, a detectable signal will appear at the location of the second capture region.

[0230] In some embodiments, the invention provides a method for quantifying target nucleic acids in samples comprising distributing a sample or set of samples into one or more individual discrete volumes comprising two or more CRISPR systems as described herein. The method may comprise using HDA to amplify one or more target molecules in the sample or set of samples, as described herein. The method may further comprise incubating the sample or set of samples under conditions sufficient to allow binding of the guide RNAs to one or more target molecules. The method may further comprise activating the CRISPR effector protein via binding of the guide RNAs to the one or more target molecules. Activating the CRISPR effector protein may result in modification of the detection construct such that a detectable positive signal is generated. The method may further comprise detecting the one or more detectable positive signals, wherein detection indicates the presence of one or more target molecules in the sample. The method may further comprise comparing the intensity of the one or more signals to a control to quantify the nucleic acid in the sample. The steps of amplifying, incubating, activating, and detecting may all be performed in the same individual discrete volume.

### Amplifying Target Molecules

[0231] The step of amplifying one or more target molecules can comprise amplification systems known in the art. In some embodiments, amplification is isothermal. In certain example embodiments, target RNAs and/or DNAs may be amplified prior to activating the CRISPR effector protein. Any suitable RNA or DNA amplification technique may be used. In certain example embodiments, the RNA or DNA amplification is an isothermal amplification. In certain example embodiments, the isothermal amplification may be nucleic-acid sequenced-based amplification (NASBA), recombinase polymerase amplification (RPA), loop-mediated isothermal amplification (LAMP), strand displacement amplification (SDA), helicase-dependent amplification (HDA), or nicking enzyme amplification reaction (NEAR). In certain example embodiments, non-isothermal amplification methods may be used which include, but are not limited to, PCR, multiple displacement amplification (MDA), rolling circle amplification (RCA), ligase chain reaction (LCR), or ramification amplification method (RAM).

[0232] In certain example embodiments, the RNA or DNA amplification is NASBA, which is initiated with reverse transcription of target RNA by a sequence-specific reverse primer to create a RNA/DNA duplex. RNase H is then used to degrade the RNA template, allowing a forward primer containing a promoter, such as the T7 promoter, to bind and initiate elongation of the complementary strand, generating a double-stranded DNA product. The RNA polymerase promoter-mediated transcription of the DNA template then creates copies of the target RNA sequence. Importantly, each of the new target RNAs can be detected by the guide RNAs thus further enhancing the sensitivity of the assay. Binding of the target RNAs by the guide RNAs then leads to activation of the CRISPR effector protein and the methods proceed as outlined above. The NASBA reaction has the additional advantage of being able to proceed under moderate isothermal conditions, for example at approximately 41° C., making it suitable for systems and devices deployed for early and direct detection in the field and far from clinical laboratories.

[0233] In certain other example embodiments, a recombinase polymerase amplification (RPA) reaction may be used to amplify the target nucleic acids. RPA reactions employ recombinases which are capable of pairing sequence-specific primers with homologous sequence in duplex DNA. If target DNA is present, DNA amplification is initiated and no other sample manipulation such as thermal cycling or chemical melting is required. The entire RPA amplification system is stable as a dried formulation and can be transported safely without refrigeration. RPA reactions may also be carried out at isothermal temperatures with an optimum reaction temperature of 37-42° C. The sequence specific primers are designed to amplify a sequence comprising the target nucleic acid sequence to be detected. In certain example embodiments, a RNA polymerase promoter, such as a T7 promoter, is added to one of the primers. This results in an amplified double-stranded DNA product comprising the target sequence and a RNA polymerase promoter. After, or during, the RPA reaction, a RNA polymerase is added that will produce RNA from the double-stranded DNA templates. The amplified target RNA can then in turn be detected by the CRISPR effector system. In this way target DNA can be detected using the embodiments disclosed herein. RPA reactions can also be used to amplify target RNA. The target RNA is first converted to cDNA using a reverse transcriptase, followed by second strand DNA synthesis, at which point the RPA reaction proceeds as outlined above.

[0234] In an embodiment of the invention may comprise nickase-based amplification. The nicking enzyme may be a CRISPR protein. Accordingly, the introduction of nicks into dsDNA can be programmable and sequence-specific. FIG. 115 depicts an embodiment of the invention, which starts with two guides designed to target opposite strands of a dsDNA target. According to the invention, the nickase can be Cpf1, C2c1, Cas9 or any ortholog or CRISPR protein that cleaves or is engineered to cleave a single strand of a DNA duplex. The nicked strands may then be extended by a polymerase. In an embodiment, the locations of the nicks are selected such that extension of the strands by a polymerase is towards the central portion of the target duplex DNA between the nick sites. In certain embodiments, primers are included in the reaction capable of hybridizing to the extended strands followed by further polymerase extension of the primers to regenerate two dsDNA pieces: a first dsDNA that includes the first strand Cpf1 guide site or both the first and second strand Cpf1 guide sites, and a second dsDNA that includes the second strand Cpf1 guide site or both the first and second strand Cprf guide sites. These pieces continue to be nicked and extended in a cyclic reaction that exponentially amplifies the region of the target between nicking sites.

[0235] The amplification can be isothermal and selected for temperature. In one embodiment, the amplification proceeds rapidly at 37 degrees. In other embodiments, the temperature of the isothermal amplification may be chosen by selecting a polymerase (e.g. Bsu, Bst, Phi29, klenow fragment etc.) operable at a different temperature.

[0236] Thus, whereas nicking isothermal amplification techniques use nicking enyzmes with fixed sequence preference (e.g. in nicking enzyme amplification reaction or NEAR), which requires denaturing of the original dsDNA target to allow annealing and extension of primers that add the nicking substrate to the ends of the target, use of a CRISPR nickase wherein the nicking sites can be programed via guide RNAs means that no denaturing step is necessary, enabling the entire reaction to be truly isothermal. This also simplifies the reaction because these primers that add the nicking substrate are different than the primers that are used later in the reaction, meaning that NEAR requires two primer sets (i.e. 4 primers) while Cpf1 nicking amplification only requires one primer set (i.e. two primers). This makes nicking Cpf1 amplification much simpler and easier to operate without complicated instrumentation to perform the denaturation and then cooling to the isothermal temperature.

[0237] Accordingly, in certain example embodiments the systems disclosed herein may include amplification reagents. Different components or reagents useful for amplification of nucleic acids are described herein. For example, an amplification reagent as described herein may include a buffer, such as a Tris buffer. A Tris buffer may be used at any concentration appropriate for the desired application or use, for example including, but not limited to, a concentration of 1 mM, 2 mM, 3 mM, 4 mM, 5 mM, 6 mM, 7 mM, 8 mM, 9 mM, 10 mM, 11 mM, 12 mM, 13 mM, 14 mM, 15 mM, 25 mM, 50 mM, 75 mM, 1 M, or the like. One of skill in the art will be able to determine an appropriate concentration of a buffer such as Tris for use with the present invention.

[0238] A salt, such as magnesium chloride (MgCl2), potassium chloride (KCl), or sodium chloride (NaCl), may be included in an amplification reaction, such as PCR, in order to improve the amplification of nucleic acid fragments. Although the salt concentration will depend on the particular reaction and application, in some embodiments, nucleic acid fragments of a particular size may produce optimum results at particular salt concentrations. Larger products may require altered salt concentrations, typically lower salt, in order to produce desired results, while amplification of smaller products may produce better results at higher salt concentrations. One of skill in the art will understand that the presence and/or concentration of a salt, along with alteration of salt concentrations, may alter the stringency of a biological or chemical reaction, and therefore any salt may be used that provides the appropriate conditions for a reaction of the present invention and as described herein.

[0239] Other components of a biological or chemical reaction may include a cell lysis component in order to break open or lyse a cell for analysis of the materials therein. A cell lysis component may include, but is not limited to, a detergent, a salt as described above, such as NaCl, KCl, ammonium sulfate [(NH4)2SO4], or others. Detergents that may be appropriate for the invention may include Triton X-100, sodium dodecyl sulfate (SDS), CHAPS (3-[(3-cholamidopropyl)dimethylammonio]-1-propanesulfonate), ethyl trimethyl ammonium bromide, nonyl phenoxypolyethoxylethanol (NP-40). Concentrations of detergents may depend on the particular application, and may be specific to the reaction in some cases. Amplification reactions may include dNTPs and nucleic acid primers used at any concentration appropriate for the invention, such as including, but not limited to, a concentration of 100 nM, 150 nM, 200 nM, 250 nM, 300 nM, 350 nM, 400 nM, 450 nM, 500 nM, 550 nM, 600 nM, 650 nM, 700 nM, 750 nM, 800 nM, 850 nM, 900 nM, 950 nM, 1 mM, 2 mM, 3 mM, 4 mM, 5 mM, 6 mM, 7 mM, 8 mM, 9 mM, 10 mM, 20 mM, 30 mM, 40 mM, 50 mM, 60 mM, 70 mM, 80 mM, 90 mM, 100 mM, 150 mM, 200 mM, 250 mM, 300 mM, 350 mM, 400 mM, 450 mM, 500 mM, or the like. Likewise, a polymerase useful in accordance with the invention may be any specific or general polymerase known in the art and useful or the invention, including Taq polymerase, Q5 polymerase, or the like.

[0240] In some embodiments, amplification reagents as described herein may be appropriate for use in hot-start amplification. Hot start amplification may be beneficial in some embodiments to reduce or eliminate dimerization of adaptor molecules or oligos, or to otherwise prevent unwanted amplification products or artifacts and obtain optimum amplification of the desired product. Many components described herein for use in amplification may also be used in hot-start amplification. In some embodiments, reagents or components appropriate for use with hot-start amplification may be used in place of one or more of the composition components as appropriate. For example, a polymerase or other reagent may be used that exhibits a desired activity at a particular temperature or other reaction condition. In some embodiments, reagents may be used that are designed or optimized for use in hot-start amplification, for example, a polymerase may be activated after transposition or after reaching a particular temperature. Such polymerases may be antibody-based or aptamer-based. Polymerases as described herein are known in the art. Examples of such reagents may include, but are not limited to, hot-start polymerases, hot-start dNTPs, and photo-caged dNTPs. Such reagents are known and available in the art. One of skill in the art will be able to determine the optimum temperatures as appropriate for individual reagents.

[0241] Amplification of nucleic acids may be performed using specific thermal cycle machinery or equipment, and may be performed in single reactions or in bulk, such that any desired number of reactions may be performed simultaneously. In some embodiments, amplification may be performed using microfluidic or robotic devices, or may be performed using manual alteration in temperatures to achieve the desired amplification. In some embodiments, optimization may be performed to obtain the optimum reactions conditions for the particular application or materials. One of skill in the art will understand and be able to optimize reaction conditions to obtain sufficient amplification.

[0242] In certain embodiments, detection of DNA with the methods or systems of the invention requires transcription of the (amplified) DNA into RNA prior to detection.

[0243] It will be evident that detection methods of the invention can involve nucleic acid amplification and detection procedures in various combinations. The nucleic acid to be detected can be any naturally occurring or synthetic nucleic acid, including but not limited to DNA and RNA, which may be amplified by any suitable method to provide an intermediate product that can be detected. Detection of the intermediate product can be by any suitable method including but not limited to binding and activation of a CRISPR protein which produces a detectable signal moiety by direct or collateral activity.

[0244] Helicase-Dependent Amplification

[0245] In helicase-dependent amplification, a helicase enzyme is used to unwind a double stranded nucleic acid to generate templates for primer hybridization and subsequent primer-extension. This process utilizes two oligonucleotide primers, each hybridizing to the 3′-end of either the sense strand containing the target sequence or the anti-sense strand containing the reverse-complementary target sequence. The HDA reaction is a general method for helicase-dependent nucleic acid amplification.

[0246] In combining this method with a CRISPR-SHERLOCK system, the target nucleic acid may be amplified by opening R-loops of the target nucleic acid using first and second CRISPR/Cas complexes. The first and second strand of the target nucleic acid may thus be unwound using a helicase, allowing primers and polymerase to bind and extend the DNA under isothermal conditions.

[0247] The term “helicase” refers here to any enzyme capable of unwinding a double stranded nucleic acid enzymatically. For example, helicases are enzymes that are found in all organisms and in all processes that involve nucleic acid such as replication, recombination, repair, transcription, translation and RNA splicing. (Kornberg and Baker, DNA Replication, W. H. Freeman and Company (2^{nd} ed. (1992)), especially chapter 11). Any helicase that translocates along DNA or RNA in a 5′ to 3′ direction or in the opposite 3′ to 5′ direction may be used in present embodiments of the invention. This includes helicases obtained from prokaryotes, viruses, archaea, and eukaryotes or recombinant forms of naturally occurring enzymes as well as analogues or derivatives having the specified activity. Examples of naturally occurring DNA helicases, described by Kornberg and Baker in chapter 11 of their book, DNA Replication, W. H. Freeman and Company (2^{nd} ed. (1992)), include E. coli helicase I, II, III, & IV, Rep, DnaB, PriA, PcrA, T4 Gp41 helicase, T4 Dda helicase, T7 Gp4 helicases, SV40 Large T antigen, yeast RAD. Additional helicases that may be useful in HDA include RecQ helicase (Harmon and Kowalczykowski, J. Biol. Chem. 276:232-243 (2001)), thermostable UvrD helicases from T. tengcongensis (disclosed in this invention, Example XII) and T. thermophilus (Collins and McCarthy, Extremophiles. 7:35-41. (2003)), thermostable DnaB helicase from T. aquaticus (Kaplan and Steitz, J. Biol. Chem. 274:6889-6897 (1999)), and MCM helicase from archaeal and eukaryotic organisms ((Grainge et al., Nucleic Acids Res. 31:4888-4898 (2003)).

[0248] A traditional definition of a helicase is an enzyme that catalyzes the reaction of separating/unzipping/unwinding the helical structure of nucleic acid duplexes (DNA, RNA or hybrids) into single-stranded components, using nucleoside triphosphate (NTP) hydrolysis as the energy source (such as ATP). However, it should be noted that not all helicases fit this definition anymore. A more general definition is that they are motor proteins that move along the single-stranded or double stranded nucleic acids (usually in a certain direction, 3′ to 5′ or 5 to 3, or both), i.e. translocases, that can or cannot unwind the duplexed nucleic acid encountered. In addition, some helicases simply bind and “melt” the duplexed nucleic acid structure without an apparent translocase activity.

[0249] Helicases exist in all living organisms and function in all aspects of nucleic acid metabolism. Helicases are classified based on the amino acid sequences, directionality, oligomerization state and nucleic-acid type and structure preferences. The most common classification method was developed based on the presence of certain amino acid sequences, called motifs. According to this classification helicases are divided into 6 super families: SF1, SF2, SF3, SF4, SF5 and SF6. SF1 and SF2 helicases do not form a ring structure around the nucleic acid, whereas SF3 to SF6 do. Superfamily classification is not dependent on the classical taxonomy.

[0250] DNA helicases are responsible for catalyzing the unwinding of double-stranded DNA (dsDNA) molecules to their respective single-stranded nucleic acid (ssDNA) forms. Although structural and biochemical studies have shown how various helicases can translocate on ssDNA directionally, consuming one ATP per nucleotide, the mechanism of nucleic acid unwinding and how the unwinding activity is regulated remains unclear and controversial (T. M. Lohman, E. J. Tomko, C. G. Wu, “Non-hexameric DNA helicases and translocases: mechanisms and regulation,” Nat Rev Mol Cell Biol 9:391-401 (2008)). Since helicases can potentially unwind all nucleic acids encountered, understanding how their unwinding activities are regulated can lead to harnessing helicase functions for biotechnology applications.

[0251] The term “HDA” refers to Helicase Dependent Amplification, which is an in vitro method for amplifying nucleic acids by using a helicase preparation for unwinding a double stranded nucleic acid to generate templates for primer hybridization and subsequent primer-extension. This process utilizes two oligonucleotide primers, each hybridizing to the 3′-end of either the sense strand containing the target sequence or the anti-sense strand containing the reverse-complementary target sequence. The HDA reaction is a general method for helicase-dependent nucleic acid amplification.

[0252] The invention comprises use of any suitable helicase known in the art. These include, but are not necessarily limited to, UvrD helicase, CRISPR-Cas3 helicase, E. coli helicase I, E. coli helicase II, E. coli helicase III, E. coli helicase IV, Rep helicase, DnaB helicase, PriA helicase, PcrA helicase, T4 Gp41 helicase, T4 Dda helicase, SV40 Large T antigen, yeast RAD helicase, RecD helicase, RecQ helicase, thermostable T. tengcongensis UvrD helicase, thermostable T. thermophilus UvrD helicase, thermostable T. aquaticus DnaB helicase, Dda helicase, papilloma virus E1 helicase, archaeal MCM helicase, eukaryotic MCM helicase, and T7 Gp4 helicase.

[0253] In particularly preferred embodiments, the helicase comprises a super mutation. In particular embodiments, Although the E. coli mutation has been described, the mutations were generated by sequence alignment (e.g. D409A/D410A for TteUvrd) and result in thermophilic enzymes working at lower temperatures like 37 C, which is advantageous for amplification methods and systems described herein. In some embodiments, the super mutant is an aspartate to alanine mutation, with position based on sequence alignment. In some embodiments, the super mutant helicase is selected from WP_003870487.1 Thermoanaerobacter ethanolicus 403/404, WP_049660019.1 Bacillus sp. FJAT-27231 407/408, WP_034654680.1 Bacillus megaterium 415/416, WP_095390358.1 Bacillus simplex 407/408, and WP_055343022.1 Paeniclostridium sordellii 402/403.

[0254] An “individual discrete volume” is a discrete volume or discrete space, such as a container, receptacle, or other defined volume or space that can be defined by properties that prevent and/or inhibit migration of nucleic acids and reagents necessary to carry out the methods disclosed herein, for example a volume or space defined by physical properties such as walls, for example the walls of a well, tube, or a surface of a droplet, which may be impermeable or semipermeable, or as defined by other means such as chemical, diffusion rate limited, electro-magnetic, or light illumination, or any combination thereof. By “diffusion rate limited” (for example diffusion defined volumes) is meant spaces that are only accessible to certain molecules or reactions because diffusion constraints effectively defining a space or volume as would be the case for two parallel laminar streams where diffusion will limit the migration of a target molecule from one stream to the other. By “chemical” defined volume or space is meant spaces where only certain target molecules can exist because of their chemical or molecular properties, such as size, where for example gel beads may exclude certain species from entering the beads but not others, such as by surface charge, matrix size or other physical property of the bead that can allow selection of species that may enter the interior of the bead. By “electro-magnetically” defined volume or space is meant spaces where the electro-magnetic properties of the target molecules or their supports such as charge or magnetic properties can be used to define certain regions in a space such as capturing magnetic particles within a magnetic field or directly on magnets. By “optically” defined volume is meant any region of space that may be defined by illuminating it with visible, ultraviolet, infrared, or other wavelengths of light such that only target molecules within the defined space or volume may be labeled. One advantage to the used of non-walled, or semipermeable is that some reagents, such as buffers, chemical activators, or other agents maybe passed in Applicants' through the discrete volume, while other material, such as target molecules, maybe maintained in the discrete volume or space. Typically, a discrete volume will include a fluid medium, (for example, an aqueous solution, an oil, a buffer, and/or a media capable of supporting cell growth) suitable for labeling of the target molecule with the indexable nucleic acid identifier under conditions that permit labeling. Exemplary discrete volumes or spaces useful in the disclosed methods include droplets (for example, microfluidic droplets and/or emulsion droplets), hydrogel beads or other polymer structures (for example poly-ethylene glycol di-acrylate beads or agarose beads), tissue slides (for example, fixed formalin paraffin embedded tissue slides with particular regions, volumes, or spaces defined by chemical, optical, or physical means), microscope slides with regions defined by depositing reagents in ordered arrays or random patterns, tubes (such as, centrifuge tubes, microcentrifuge tubes, test tubes, cuvettes, conical tubes, and the like), bottles (such as glass bottles, plastic bottles, ceramic bottles, Erlenmeyer flasks, scintillation vials and the like), wells (such as wells in a plate), plates, pipettes, or pipette tips among others. In certain example embodiments, the individual discrete volumes are the wells of a microplate. In certain example embodiments, the microplate is a 96 well, a 384 well, or a 1536 well microplate.

### Incubating

[0255] Methods of detection and or quantifying using the systems disclosed herein can comprise incubating the sample or set of samples under conditions sufficient to allow binding of the guide RNAs to one or more target molecules. In certain example embodiments, the incubation time of the present invention may be shortened. The assay may be performed in a period of time required for an enzymatic reaction to occur. One skilled in the art can perform biochemical reactions in 5 minutes (e.g., 5 minute ligation). Incubating may occur at one or more temperatures over timeframes between about 10 minutes and 3 hours, preferably less than 200 minutes, 150 minutes, 100 minutes, 75 minutes, 60 minutes, 45 minutes, 30 minutes, or 20 minutes, depending on sample, reagents and components of the system. In some embodiments, incubating is performed at one or more temperatures between about 20° C. and 80° C., in some embodiments, about 37° C.

### Activating

[0256] Activating of the CRISPR effector protein occurs via binding of the guide RNAs to the one or more target molecules, wherein activating the CRISPR effector protein results in modification of the detection construct such that a detectable positive signal is generated.

### Detecting a Signal

[0257] Detecting may comprise visual observance of a positive signal relative to a control. Detecting may comprise a loss of signal or presence of signal at one or more capture regions, for example colorimetric detection, or fluorescent detection. In certain example embodiments, further modifications may be introduced that further amplify the detectable positive signal. For example, activated CRISPR effector protein collateral activation may be used to generate a secondary target or additional guide sequence, or both. In one example embodiment, the reaction solution would contain a secondary target that is spiked in at high concentration. The secondary target may be distinct from the primary target (i.e. the target for which the assay is designed to detect) and in certain instances may be common across all reaction volumes. A secondary guide sequence for the secondary target may be protected, e.g. by a secondary structural feature such as a hairpin with an RNA loop, and unable to bind the second target or the CRISPR effector protein. Cleavage of the protecting group by an activated CRISPR effector protein (i.e. after activation by formation of complex with the primary target(s) in solution) and formation of a complex with free CRISPR effector protein in solution and activation from the spiked in secondary target. In certain other example embodiments, a similar concept is used with free guide sequence to a secondary target and protected secondary target. Cleavage of a protecting group off the secondary target would allow additional CRISPR effector protein, guide sequence, secondary target sequence to form. In yet another example embodiment, activation of CRISPR effector protein by the primary target(s) may be used to cleave a protected or circularized primer, which would then be released to perform an isothermal amplification reaction, such as those disclosed herein, on a template for either secondary guide sequence, secondary target, or both. Subsequent transcription of this amplified template would produce more secondary guide sequence and/or secondary target sequence, followed by additional CRISPR effector protein collateral activation.

### Quantifying

[0258] In particular methods, comparing the intensity of the one or more signals to a control is performed to quantify the nucleic acid in the sample. The term “control” refers to any reference standard suitable to provide a comparison to the expression products in the test sample. In one embodiment, the control comprises obtaining a “control sample” from which expression product levels are detected and compared to the expression product levels from the test sample. Such a control sample may comprise any suitable sample, including but not limited to a sample from a control patient (can be stored sample or previous sample measurement) with a known outcome; normal tissue, fluid, or cells isolated from a subject, such as a normal patient or the patient having a condition of interest.

[0259] The intensity of a signal is “significantly” higher or lower than the normal intensity if the signal is greater or less, respectively, than the normal or control level by an amount greater than the standard error of the assay employed to assess amount, and preferably at least 20%, 30%, 40%, 50%, 60%, 70%, 80%, 90%, 100%, 150%, 200%, 300%, 350%, 400%, 500%, 600%, 700%, 800%, 900%, 1000% or than that amount. Alternatively, the signal can be considered “significantly” higher or lower than the normal and/or control signal if the amount is at least about two, and preferably at least about 5%, 10%, 15%, 20%, 25%, 30%, 35%, 40%, 45%, 50%, 55%, 60%, 65%, 70%, 75%, 80%, 85%, 90%, 95%, 100%, 105%, 110%, 115%, 120%, 125%, 130%, 135%, 140%, 145%, 150%, 155%, 160%, 165%, 170%, 175%, 180%, 185%, 190%, 195%, two times, three times, four times, five times, or more, or any range in between, such as 5%-100%, higher or lower, respectively, than the normal and/or control signal. Such significant modulation values can be applied to any metric described herein, such as altered level of expression, altered activity, changes in biomarker inhibition, changes in test agent binding, and the like.

[0260] In some embodiments, the detectable positive signal may be a loss of fluorescent signal relative to a control, as described herein. In some embodiments, the detectable positive signal may be detected on a lateral flow device, as described herein.

### Applications of Detection Methods

[0261] In certain example embodiments, the systems, devices, and methods, disclosed herein are directed to detecting the presence of one or more microbial agents in a sample, such as a biological sample obtained from a subject. In certain example embodiments, the microbe may be a bacterium, a fungus, a yeast, a protozoan, a parasite, or a virus. Accordingly, the methods disclosed herein can be adapted for use in other methods (or in combination) with other methods that require quick identification of microbe species, monitoring the presence of microbial proteins (antigens), antibodies, antibody genes, detection of certain phenotypes (e.g. bacterial resistance), monitoring of disease progression and/or outbreak, and antibiotic screening. Because of the rapid and sensitive diagnostic capabilities of the embodiments disclosed here, detection of microbe species type, down to a single nucleotide difference, and the ability to be deployed as a POC device, the embodiments disclosed herein may be used as guide therapeutic regimens, such as a selection of the appropriate antibiotic or antiviral. The embodiments disclosed herein may also be used to screen environmental samples (air, water, surfaces, food etc.) for the presence of microbial contamination.

[0262] Disclosed is a method to identify microbial species, such as bacterial, viral, fungal, yeast, or parasitic species, or the like. Particular embodiments disclosed herein describe methods and systems that will identify and distinguish microbial species within a single sample, or across multiple samples, allowing for recognition of many different microbes. The present methods allow the detection of pathogens and distinguishing between two or more species of one or more organisms, e.g., bacteria, viruses, yeast, protozoa, and fungi or a combination thereof, in a biological or environmental sample, by detecting the presence of a target nucleic acid sequence in the sample. A positive signal obtained from the sample indicates the presence of the microbe. Multiple microbes can be identified simultaneously using the methods and systems of the invention, by employing the use of more than one effector protein, wherein each effector protein targets a specific microbial target sequence. In this way, a multi-level analysis can be performed for a particular subject in which any number of microbes can be detected at once. In some embodiments, simultaneous detection of multiple microbes may be performed using a set of probes that can identify one or more microbial species.

[0263] The systems and methods of detection can be used to identify single nucleotide variants, detection based on rRNA sequences, screening for drug resistance, monitoring microbe outbreaks, genetic perturbations, and screening of environmental samples, as described in PCT/US2018/054472 filed Oct. 22, 2018 at [0183]-[0327], incorporated herein by reference.

[0264] In certain example embodiments, the systems, devices, and methods disclosed herein may be used for biomarker detection. For example, the systems, devices and method disclosed herein may be used for SNP detection and/or genotyping. The systems, devices and methods disclosed herein may be also used for the detection of any disease state or disorder characterized by aberrant gene expression. Aberrant gene expression includes aberration in the gene expressed, location of expression and level of expression. Multiple transcripts or protein markers related to cardiovascular, immune disorders, and cancer among other diseases may be detected. In certain example embodiments, the embodiments disclosed herein may be used for cell free DNA detection of diseases that involve lysis, such as liver fibrosis and restrictive/obstructive lung disease. In certain example embodiments, the embodiments could be utilized for faster and more portable detection for pre-natal testing of cell-free DNA. The embodiments disclosed herein may be used for screening panels of different SNPs associated with, among others, cardiovascular health, lipid/metabolic signatures, ethnicity identification, paternity matching, human ID (e.g. matching suspect to a criminal database of SNP signatures). The embodiments disclosed herein may also be used for cell free DNA detection of mutations related to and released from cancer tumors. The embodiments disclosed herein may also be used for detection of meat quality, for example, by providing rapid detection of different animal sources in a given meat product. Embodiments disclosed herein may also be used for the detection of GMOs or gene editing related to DNA. As described herein elsewhere, closely related genotypes/alleles or biomarkers (e.g. having only a single nucleotide difference in a given target sequence) may be distinguished by introduction of a synthetic mismatch in the gRNA.

[0265] In an aspect, the invention relates to a method for detecting target nucleic acids in samples, comprising:

[0266] distributing a sample or set of samples into one or more individual discrete volumes, the individual discrete volumes comprising a CRISPR system according to the invention as described herein;

[0267] incubating the sample or set of samples under conditions sufficient to allow binding of the one or more guide RNAs to one or more target molecules;

[0268] activating the CRISPR effector protein via binding of the one or more guide RNAs to the one or more target molecules, wherein activating the CRISPR effector protein results in modification of the RNA-based masking construct such that a detectable positive signal is generated; and

[0269] detecting the detectable positive signal, wherein detection of the detectable positive signal indicates a presence of one or more target molecules in the sample.

[0270] The sensitivity of the assays described herein are well suited for detection of target nucleic acids in a wide variety of biological sample types, including sample types in which the target nucleic acid is dilute or for which sample material is limited. Biomarker screening may be carried out on a number of sample types including, but not limited to, saliva, urine, blood, feces, sputum, and cerebrospinal fluid. The embodiments disclosed herein may also be used to detect up- and/or down-regulation of genes. For example, as sample may be serially diluted such that only over-expressed genes remain above the detection limit threshold of the assay.

[0271] In certain embodiments, the present invention provides steps of obtaining a sample of biological fluid (e.g., urine, blood plasma or serum, sputum, cerebral spinal fluid), and extracting the DNA. The mutant nucleotide sequence to be detected, may be a fraction of a larger molecule or can be present initially as a discrete molecule.

[0272] In certain embodiments, DNA is isolated from plasma/serum of a cancer patient. For comparison, DNA samples isolated from neoplastic tissue and a second sample may be isolated from non-neoplastic tissue from the same patient (control), for example, lymphocytes. The non-neoplastic tissue can be of the same type as the neoplastic tissue or from a different organ source. In certain embodiments, blood samples are collected and plasma immediately separated from the blood cells by centrifugation. Serum may be filtered and stored frozen until DNA extraction.

[0273] In certain example embodiments, target nucleic acids are detected directly from a crude or unprocessed sample sample, such as blood, serum, saliva, cebrospinal fluid, sputum, or urine. In certain example embodiments, the target nucleic acid is cell free DNA.

### Methods for Designing Guides

[0274] A method for designing guide RNAs for use in the detection systems of the preceding claims, the method comprising the steps of designing putative guide RNAs tiled across a target molecule of interest; creating a training model based on results of incubating guide RNAs with a Cas13 protein and the target molecule; predicting highly active guide RNAs for the target molecule, wherein the predicting comprises optimizing the nucleotide at each base position in the guide RNA based on the training model; and validating the predicted highly active guide RNAs by incubating the guide RNAs with the Cas13 protein and the target molecule.

[0275] In some embodiments, the invention provides a method for designing guide RNAs for use in the detection systems described herein. The method may comprise designing putative guide RNAs tiled across a target molecule of interest. The method may further comprise creating a training model based on results of incubating guide RNAs with a Cas13 protein and the target molecule. The method may further comprise predicting highly active guide RNAs for the target molecule. Predicting may comprise optimizing the nucleotide at each base position in the guide RNA based on the training model. The method may further comprise validating the predicted highly active guide RNAs by incubating the guide RNAs with the Cas13 protein and the target molecule.

[0276] In certain instances, the optimized guide for the target molecule is generated by pooling a set of guides, the guides produced by tiling guides across the target molecule; incubating the set of guides with a Cas polypeptide and the target molecule and measuring cleavage activity of each guide in the set; creating a training model based on the cleavage activity of the set of guides in the incubating step. Steps of predicting highly active guides for the target molecule and identifying the optimized guides by incubating the predicted highly active guides with the Cas polypeptide and the target molecule and selecting optimized guides may also be utilized in generating optimized guides. In embodiments, the training model comprises one or more input features selected from guide sequence, flanking target sequence, normalized positions of the guide in the target and guide GC content. In certain instances, the guide sequence and/or flanking sequence input comprises one hit encoding mono-nucleotide and/or dinucleotide In an embodiments, the training model comprises applying logistic regression model on the activity of the guides across the one or more input features.

[0277] In an aspect, the predicting highly active guides for the target molecule comprises selecting guides with an increase in activity of a guide relative to the median activity, or selecting guides with highest guide activity. In certain instances, the increase in activity is measured by an increase in fluorescence. Guides may be selected based on a particular cutoff, in certain instances based on activity relative to a median or above a particular cutoff-, for instance, are selected with a 1.5, 2, 2.5 or 3-fold activity relative to median, or are in the top quartile or quintile for each target tested.

[0278] The optimized guides may be generated for a Cas13 ortholog, in some instances, the optimized guide is generated for an LwaCas13a or a Cca13b ortholog.

[0279] In some embodiments, the invention provides a method for designing guide RNAs for use in the detection systems described herein. The method may comprise designing putative guide RNAs tiled across a target molecule of interest. The method may further comprise creating a training model based on results of incubating guide RNAs with a Cas13 protein and the target molecule. The method may further comprise predicting highly active guide RNAs for the target molecule. Predicting may comprise optimizing the nucleotide at each base position in the guide RNA based on the training model. The method may further comprise validating the predicted highly active guide RNAs by incubating the guide RNAs with the Cas13 protein and the target molecule.

[0280] The design of putative guide RNAs for target molecules of interest is described elsewhere herein.

[0281] The creation of training models is known in the art. Machine learning can be generalized as the ability of a learning machine to perform accurately on new, unseen examples/tasks after having experienced a learning data set. Machine learning may include the following concepts and methods. Supervised learning concepts may include AODE; Artificial neural network, such as Backpropagation, Autoencoders, Hopfield networks, Boltzmann machines, Restricted Boltzmann Machines, and Spiking neural networks; Bayesian statistics, such as Bayesian network and Bayesian knowledge base; Case-based reasoning; Gaussian process regression; Gene expression programming; Group method of data handling (GMDH); Inductive logic programming; Instance-based learning; Lazy learning; Learning Automata; Learning Vector Quantization; Logistic Model Tree; Minimum message length (decision trees, decision graphs, etc.), such as Nearest Neighbor Algorithm and Analogical modeling; Probably approximately correct learning (PAC) learning; Ripple down rules, a knowledge acquisition methodology; Symbolic machine learning algorithms; Support vector machines; Random Forests; Ensembles of classifiers, such as Bootstrap aggregating (bagging) and Boosting (meta-algorithm); Ordinal classification; Information fuzzy networks (IFN); Conditional Random Field; ANOVA; Linear classifiers, such as Fisher's linear discriminant, Linear regression, Logistic regression, Multinomial logistic regression, Naive Bayes classifier, Perceptron, Support vector machines; Quadratic classifiers; k-nearest neighbor; Boosting; Decision trees, such as C4.5, Random forests, ID3, CART, SLIQ, SPRINT; Bayesian networks, such as Naive Bayes; and Hidden Markov models. Unsupervised learning concepts may include; Expectation-maximization algorithm; Vector Quantization; Generative topographic map; Information bottleneck method; Artificial neural network, such as Self-organizing map; Association rule learning, such as, Apriori algorithm, Eclat algorithm, and FP-growth algorithm; Hierarchical clustering, such as Single-linkage clustering and Conceptual clustering; Cluster analysis, such as, K-means algorithm, Fuzzy clustering, DBSCAN, and OPTICS algorithm; and Outlier Detection, such as Local Outlier Factor. Semi-supervised learning concepts may include; Generative models; Low-density separation; Graph-based methods; and Co-training. Reinforcement learning concepts may include; Temporal difference learning; Q-learning; Learning Automata; and SARSA. Deep learning concepts may include; Deep belief networks; Deep Boltzmann machines; Deep Convolutional neural networks; Deep Recurrent neural networks; and Hierarchical temporal memory.

[0282] The methods as disclosed herein designing putative guide RNAs may comprise design based on one or more variables, including guide sequence, flanking target sequence, guide position and guide GC content as input features. In certain embodiments, the length of the flanking target region can be considered a freeparameter and can be further selected during cross-validation. Additionally, mono-nucleotide and/or dinucleotide based identities across a guide length and flanking sequence in the target, varying one or more of flanking sequence length, normalized positions of the guide in the target, and GC content of the guide, or a combination thereof.

[0283] In embodiments, the training model for the guide design is Cas protein specific. In embodiments, the Cas protein is a Cas13a, Cas13b or Cas12 a protein. In certain embodiments, the protein is LwaCas13a or CcaCas13b. Selection for the best guides can be dependent on each enzyme. In particular embodiments, where majority of guides have activity above background on a per-target basis, selection of guides may be based on 1.5 fold, 2, 2.5, 3 or more fold activity over the median activity. In other instances, the best performing guides may be at or near background fluorescence. In this instance, the guide selection may be based on a top percentile, e.g. quartile or quintile, of performing guides.

[0284] Codon optimization is described elsewhere herein. In specific embodiments, the nucleotide at each base position in the guide RNA may be optimized based on the training model, thus allowing for prediction of highly active guide RNAs for the target molecule.

[0285] The predicted highly active guide RNAs may then be validated or verified by incubating the guide RNAs with a Cas effector protein, such as Cas13 protein and the target molecule, as described in the examples.

[0286] In certain embodiments, optimization comprises validation of best performing models for a particular Cas polypeptide across multiple guides may comprise comparing the predicted score of each guide versus actual collateral activity upon target recognition. In embodiments, kinetic data of the best and worst predicted guides are evaluated. In embodiments, lateral flow performance of the predicted guides is evaluated for a target sequence.

[0287] The following table 1 is comprised of sequences contained in the accompanying Sequence Listing. Sequences referenced in Column 4 “Complete crRNA sequence” are represented in the Sequence Listing by SEQ ID NOs: 12-1100; Sequences referenced in Column 5 “Spacer” are represented in the Sequence Listing by SEQ ID Nos: 1101-2189; and Sequences referenced in Column 6 “Direct Repeat” are represented in the Sequence Listing by SEQ ID NOs: 2190-3278, all in the order in which they appear.

TABLE 1
Guide RNA sequences used in this study

| | | | Complete crRNA | | | | 1st |
|---|---|---|---|---|---|---|---|
| Fig | Name | Ortholog | sequence | Spacer | Direct repeat | Target | Fig. |
| 9a | dengue_0 | LwaCas13a | GATTTAGACTACCCCAAAA | ttgagaggtt | GATTTAGACTAC | Dengue | 9a |
| | 0 | | ACGAAGGGGACTAAAACtt | ggcccctga | CCCAAAAACGAA | ssRNA | |
| | | | gagaggttggcccctgaat | atatgtact | GGGGACTAAAAC | | |
| | | | atgtact | | | | |
| 9a | dengue_0 | LwaCas13a | GATTTAGACTACCCCAAAA | gttgagaggt | GATTTAGACTAC | Dengue | 9a |
| | 1 | | ACGAAGGGGACTAAAACgt | tggcccctg | CCCAAAAACGAA | ssRNA | |
| | | | tgagaggttggcccctgaa | aatatgtac | GGGGACTAAAAC | | |
| | | | tatgtac | | | | |
| 9a | dengue_0 | LwaCas13a | GATTTAGACTACCCCAAAA | tgttgagagg | GATTTAGACTAC | Dengue | 9a |
| | 2 | | ACGAAGGGGACTAAAACtg | ttggcccctg | CCCAAAAACGAA | ssRNA | |
| | | | ttgagaggttggcccctga | aatatgta | GGGGACTAAAAC | | |
| | | | atatgta | | | | |
| 9a | dengue_0 | LwaCas13a | GATTTAGACTACCCCAAAA | ttgttgagag | GATTTAGACTAC | Dengue | 9a |
| | 3 | | ACGAAGGGGACTAAAACtt | gttggcccct | CCCAAAAACGAA | ssRNA | |
| | | | gttgagaggttggcccctg | gaatatgt | GGGGACTAAAAC | | |
| | | | aatatgt | | | | |
| 9a | dengue_0 | LwaCas13a | GATTTAGACTACCCCAAAA | attgttgaga | GATTTAGACTAC | Dengue | 9a |
| | 4 | | ACGAAGGGGACTAAAACat | ggttggccc | CCCAAAAACGAA | ssRNA | |
| | | | tgttgagaggttggcccct | ctgaatatg | GGGGACTAAAAC | | |
| | | | gaatatg | | | | |
| 9a | dengue_0 | LwaCas13a | GATTTAGACTACCCCAAAA | cattgttgag | GATTTAGACTAC | Dengue | 9a |
| | 5 | | ACGAAGGGGACTAAAACca | aggttggcc | CCCAAAAACGAA | ssRNA | |
| | | | ttgttgagaggttggcccct | cctgaatat | GGGGACTAAAAC | | |
| | | | gaatat | | | | |
| 9a | dengue_0 | LwaCas13a | GATTTAGACTACCCCAAAA | tcattgttgag | GATTTAGACTAC | Dengue | 9a |
| | 6 | | ACGAAGGGGACTAAAACtc | aggttggcc | CCCAAAAACGAA | ssRNA | |
| | | | attgttgagaggttggccc | cctgaata | GGGGACTAAAAC | | |
| | | | ctgaata | | | | |
| 9a | dengue_0 | LwaCas13a | GATTTAGACTACCCCAAAA | gtcattgttga | GATTTAGACTAC | Dengue | 9a |
| | 7 | | ACGAAGGGGACTAAAACgt | gaggttggc | CCCAAAAACGAA | ssRNA | |
| | | | cattgttgagaggttggcc | ccctgaat | GGGGACTAAAAC | | |
| | | | cctgaat | | | | |
| 9a | dengue_0 | LwaCas13a | GATTTAGACTACCCCAAAA | cgtcattgttg | GATTTAGACTAC | Dengue | 9a |
| | 8 | | ACGAAGGGGACTAAAACcg | agaggttgg | CCCAAAAACGAA | ssRNA | |
| | | | tcattgttgagaggttggc | cccctgaa | GGGGACTAAAAC | | |
| | | | ccctgaa | | | | |
| 9a | dengue_0 | LwaCas13a | GATTTAGACTACCCCAAAA | tcgtcattgtt | GATTTAGACTAC | Dengue | 9a |
| | 9 | | ACGAAGGGGACTAAAACtc | gagaggttg | CCCAAAAACGAA | ssRNA | |
| | | | gtcattgttgagaggttgg | gcccctga | GGGGACTAAAAC | | |
| | | | cccctga | | | | |
| 9a | dengue_1 | LwaCas13a | GATTTAGACTACCCCAAAA | ttcgtcattgt | GATTTAGACTAC | Dengue | 9a |
| | 0 | | ACGAAGGGGACTAAAACtt | tgagaggttg | CCCAAAAACGAA | ssRNA | |
| | | | cgtcattgttgagaggttg | gcccctg | GGGGACTAAAAC | | |
| | | | gcccctg | | | | |
| 9a | dengue_1 | LwaCas13a | GATTTAGACTACCCCAAAA | cttcgtcattg | GATTTAGACTAC | Dengue | 9a |
| | 1 | | ACGAAGGGGACTAAAACct | ttgagaggtt | CCCAAAAACGAA | ssRNA | |
| | | | tcgtcattgttgagaggtt | ggcccct | GGGGACTAAAAC | | |
| | | | ggcccct | | | | |
| 9a | dengue_1 | LwaCas13a | GATTTAGACTACCCCAAAA | tcttcgtcatt | GATTTAGACTAC | Dengue | 9a |
| | 2 | | ACGAAGGGGACTAAAACtc | gttgagaggt | CCCAAAAACGAA | ssRNA | |
| | | | ttcgtcattgttgagaggt | tggcccc | GGGGACTAAAAC | | |
| | | | tggcccc | | | | |
| 9a | dengue_1 | LwaCas13a | GATTTAGACTACCCCAAAA | gtcttcgtcat | GATTTAGACTAC | Dengue | 9a |
| | 3 | | ACGAAGGGGACTAAAACgt | tgttgagagg | CCCAAAAACGAA | ssRNA | |
| | | | cttcgtcattgttgagagg | ttggccc | GGGGACTAAAAC | | |
| | | | ttggccc | | | | |
| 9a | dengue_1 | LwaCas13a | GATTTAGACTACCCCAAAA | ggtcttcgtc | GATTTAGACTAC | Dengue | 9a |
| | 4 | | ACGAAGGGGACTAAAACgg | attgttgaga | CCCAAAAACGAA | ssRNA | |
| | | | tcttcgtcattgttgagag | ggttggcc | GGGGACTAAAAC | | |
| | | | gttggcc | | | | |
| 9a | dengue_1 | LwaCas13a | GATTTAGACTACCCCAAAA | tggtcttcgtc | GATTTAGACTAC | Dengue | 9a |
| | 5 | | ACGAAGGGGACTAAAACtg | attgttgaga | CCCAAAAACGAA | ssRNA | |
| | | | gtcttcgtcattgttgaga | ggttggc | GGGGACTAAAAC | | |
| | | | ggttggc | | | | |
| 9a | dengue_1 | LwaCas13a | GATTTAGACTACCCCAAAA | atggtcttcgt | GATTTAGACTAC | Dengue | 9a |
| | 6 | | ACGAAGGGGACTAAAACat | cattgttgag | CCCAAAAACGAA | ssRNA | |
| | | | ggtcttcgtcattgttgag | aggttgg | GGGGACTAAAAC | | |
| | | | aggttgg | | | | |
| 9a | dengue_1 | LwaCas13a | GATTTAGACTACCCCAAAA | catggtcttc | GATTTAGACTAC | Dengue | 9a |
| | 7 | | ACGAAGGGGACTAAAACca | gtcattgttga | CCCAAAAACGAA | ssRNA | |
| | | | tggtcttcgtcattgttga | gaggttg | GGGGACTAAAAC | | |
| | | | gaggttg | | | | |
| 9a | dengue_1 | LwaCas13a | GATTTAGACTACCCCAAAA | gcatggtctt | GATTTAGACTAC | Dengue | 9a |
| | 8 | | ACGAAGGGGACTAAAACgc | cgtcattgttg | CCCAAAAACGAA | ssRNA | |
| | | | atggtcttcgtcattgttg | agaggtt | GGGGACTAAAAC | | |
| | | | agaggtt | | | | |
| 9a | dengue_1 | LwaCas13a | GATTTAGACTACCCCAAAA | agcatggtct | GATTTAGACTAC | Dengue | 9a |
| | 9 | | ACGAAGGGGACTAAAACag | tcgtcattgtt | CCCAAAAACGAA | ssRNA | |
| | | | catggtcttcgtcattgtt | gagaggt | GGGGACTAAAAC | | |
| | | | gagaggt | | | | |
| 9a | dengue_2 | LwaCas13a | GATTTAGACTACCCCAAAA | tgagcatggt | GATTTAGACTAC | Dengue | 9a |
| | 0 | | ACGAAGGGGACTAAAACtg | cttcgtcattg | CCCAAAAACGAA | ssRNA | |
| | | | agcatggtcttcgtcattg | ttgagag | GGGGACTAAAAC | | |
| | | | ttgagag | | | | |
| 9a | dengue_2 | LwaCas13a | GATTTAGACTACCCCAAAA | agtgagcat | GATTTAGACTAC | Dengue | 9a |
| | 1 | | ACGAAGGGGACTAAAACag | ggtcttcgtc | CCCAAAAACGAA | ssRNA | |
| | | | tgagcatggtcttcgtcat | attgttgag | GGGGACTAAAAC | | |
| | | | tgttgag | | | | |
| 9a | dengue_2 | LwaCas13a | GATTTAGACTACCCCAAAA | ccagtgagc | GATTTAGACTAC | Dengue | 9a |
| | 2 | | ACGAAGGGGACTAAAACcc | atggtcttcgt | CCCAAAAACGAA | ssRNA | |
| | | | agtgagcatggtcttcgtc | cattgttg | GGGGACTAAAAC | | |
| | | | attgttg | | | | |
| 9a | dengue_2 | LwaCas13a | GATTTAGACTACCCCAAAA | gtccagtga | GATTTAGACTAC | Dengue | 9a |
| | 3 | | ACGAAGGGGACTAAAACgt | gcatggtctt | CCCAAAAACGAA | ssRNA | |
| | | | ccagtgagcatggtcttcg | cgtcattgt | GGGGACTAAAAC | | |
| | | | tcattgt | | | | |
| 9a | dengue_2 | LwaCas13a | GATTTAGACTACCCCAAAA | ctgtccagtg | GATTTAGACTAC | Dengue | 9a |
| | 4 | | ACGAAGGGGACTAAAACct | agcatggtct | CCCAAAAACGAA | ssRNA | |
| | | | gtccagtgagcatggtctt | tcgtcatt | GGGGACTAAAAC | | |
| | | | cgtcatt | | | | |
| 9a | dengue_2 | LwaCas13a | GATTTAGACTACCCCAAAA | ttctgtccagt | GATTTAGACTAC | Dengue | 9a |
| | 5 | | ACGAAGGGGACTAAAACtt | gagcatggt | CCCAAAAACGAA | ssRNA | |
| | | | ctgtccagtgagcatggtc | cttcgtca | GGGGACTAAAAC | | |
| | | | ttcgtca | | | | |
| 9a | dengue_2 | LwaCas13a | GATTTAGACTACCCCAAAA | gcttctgtcc | GATTTAGACTAC | Dengue | 9a |
| | 6 | | ACGAAGGGGACTAAAACgc | agtgagcat | CCCAAAAACGAA | ssRNA | |
| | | | ttctgtccagtgagcatgg | ggtcttcgt | GGGGACTAAAAC | | |
| | | | tcttcgt | | | | |
| 9a | dengue_2 | LwaCas13a | GATTTAGACTACCCCAAAA | ttgcttctgtc | GATTTAGACTAC | Dengue | 9a |
| | 7 | | ACGAAGGGGACTAAAACtt | cagtgagca | CCCAAAAACGAA | ssRNA | |
| | | | gcttctgtccagtgagcat | tggtcttc | GGGGACTAAAAC | | |
| | | | ggtcttc | | | | |
| 9a | dengue_2 | LwaCas13a | GATTTAGACTACCCCAAAA | ttttgcttctgt | GATTTAGACTAC | Dengue | 9a |
| | 8 | | ACGAAGGGGACTAAAACtt | ccagtgagc | CCCAAAAACGAA | ssRNA | |
| | | | ttgcttctgtccagtgagc | atggtct | GGGGACTAAAAC | | |
| | | | atggtct | | | | |
| 9a | dengue_2 | LwaCas13a | GATTTAGACTACCCCAAAA | atttttgcttct | GATTTAGACTAC | Dengue | 9a |
| | 9 | | ACGAAGGGGACTAAAACat | gtccagtga | CCCAAAAACGAA | ssRNA | |
| | | | ttttgcttctgtccagtga | gcatggt | GGGGACTAAAAC | | |
| | | | gcatggt | | | | |
| 9a | dengue_3 | LwaCas13a | GATTTAGACTACCCCAAAA | gcatttttgct | GATTTAGACTAC | Dengue | 9a |
| | 0 | | ACGAAGGGGACTAAAACgc | tctgtccagt | CCCAAAAACGAA | ssRNA | |
| | | | atttttgcttctgtccagt | gagcatg | GGGGACTAAAAC | | |
| | | | gagcatg | | | | |
| 9a | dengue_3 | LwaCas13a | GATTTAGACTACCCCAAAA | cagcatttttg | GATTTAGACTAC | Dengue | 9a |
| | 1 | | ACGAAGGGGACTAAAACca | cttctgtcca | CCCAAAAACGAA | ssRNA | |
| | | | gcatttttgcttctgtcca | gtgagca | GGGGACTAAAAC | | |
| | | | gtgagca | | | | |
| 9a | dengue_3 | LwaCas13a | GATTTAGACTACCCCAAAA | agcagcattt | GATTTAGACTAC | Dengue | 9a |
| | 2 | | ACGAAGGGGACTAAAACag | ttgcttctgtc | CCCAAAAACGAA | ssRNA | |
| | | | cagcatttttgcttctgtc | cagtgag | GGGGACTAAAAC | | |
| | | | cagtgag | | | | |
| 9a | dengue_3 | LwaCas13a | GATTTAGACTACCCCAAAA | ccagcagca | GATTTAGACTAC | Dengue | 9a |
| | 3 | | ACGAAGGGGACTAAAACcc | tttttgcttctg | CCCAAAAACGAA | ssRNA | |
| | | | agcagcatttttgcttctg | tccagtg | GGGGACTAAAAC | | |
| | | | tccagtg | | | | |
| 9a | dengue_3 | LwaCas13a | GATTTAGACTACCCCAAAA | gtccagcag | GATTTAGACTAC | Dengue | 9a |
| | 4 | | ACGAAGGGGACTAAAACgt | catttttgcttc | CCCAAAAACGAA | ssRNA | |
| | | | ccagcagcatttttgcttc | tgtccag | GGGGACTAAAAC | | |
| | | | tgtccag | | | | |
| 9a | dengue_3 | LwaCas13a | GATTTAGACTACCCCAAAA | ttgtccagca | GATTTAGACTAC | Dengue | 9a |
| | 5 | | ACGAAGGGGACTAAAACtt | gcatttttgct | CCCAAAAACGAA | ssRNA | |
| | | | gtccagcagcatttttgct | tctgtcc | GGGGACTAAAAC | | |
| | | | tctgtcc | | | | |
| 9a | dengue_3 | LwaCas13a | GATTTAGACTACCCCAAAA | tgttgtccag | GATTTAGACTAC | Dengue | 9a |
| | 6 | | ACGAAGGGGACTAAAACtg | cagcatttttg | CCCAAAAACGAA | ssRNA | |
| | | | ttgtccagcagcatttttg | cttctgt | GGGGACTAAAAC | | |
| | | | cttctgt | | | | |
| 9a | dengue_3 | LwaCas13a | GATTTAGACTACCCCAAAA | gatgttgtcc | GATTTAGACTAC | Dengue | 9a |
| | 7 | | ACGAAGGGGACTAAAACga | agcagcattt | CCCAAAAACGAA | ssRNA | |
| | | | tgttgtccagcagcatttt | ttgcttct | GGGGACTAAAAC | | |
| | | | tgcttct | | | | |
| 9a | dengue_3 | LwaCas13a | GATTTAGACTACCCCAAAA | ttgatgttgtc | GATTTAGACTAC | Dengue | 9a |
| | 8 | | ACGAAGGGGACTAAAACtt | cagcagcatt | CCCAAAAACGAA | ssRNA | |
| | | | gatgttgtccagcagcatt | tttgctt | GGGGACTAAAAC | | |
| | | | tttgctt | | | | |
| 9a | dengue_3 | LwaCas13a | GATTTAGACTACCCCAAAA | tgttgatgttg | GATTTAGACTAC | Dengue | 9a |
| | 9 | | ACGAAGGGGACTAAAACtg | tccagcagc | CCCAAAAACGAA | ssRNA | |
| | | | ttgatgttgtccagcagca | atttttgc | GGGGACTAAAAC | | |
| | | | tttttgc | | | | |
| 9a | dengue_4 | LwaCas13a | GATTTAGACTACCCCAAAA | tgtgttgatgt | GATTTAGACTAC | Dengue | 9a |
| | 0 | | ACGAAGGGGACTAAAACtg | tgtccagca | CCCAAAAACGAA | ssRNA | |
| | | | tgttgatgttgtccagcag | gcattttt | GGGGACTAAAAC | | |
| | | | cattttt | | | | |
| 9a | dengue_4 | LwaCas13a | GATTTAGACTACCCCAAAA | ggtgtgttga | GATTTAGACTAC | Dengue | 9a |
| | 1 | | ACGAAGGGGACTAAAACgg | tgttgtccag | CCCAAAAACGAA | ssRNA | |
| | | | tgtgttgatgttgtccagc | cagcattt | GGGGACTAAAAC | | |
| | | | agcattt | | | | |
| 9a | dengue_4 | LwaCas13a | GATTTAGACTACCCCAAAA | ctggtgtgtt | GATTTAGACTAC | Dengue | 9a |
| | 2 | | ACGAAGGGGACTAAAACct | gatgttgtcc | CCCAAAAACGAA | ssRNA | |
| | | | ggtgtgttgatgttgtcca | agcagcat | GGGGACTAAAAC | | |
| | | | gcagcat | | | | |
| 9a | dengue_4 | LwaCas13a | GATTTAGACTACCCCAAAA | ttctggtgtgt | GATTTAGACTAC | Dengue | 9a |
| | 3 | | ACGAAGGGGACTAAAACtt | tgatgttgtcc | CCCAAAAACGAA | ssRNA | |
| | | | ctggtgtgttgatgttgtc | agcagc | GGGGACTAAAAC | | |
| | | | cagcagc | | | | |
| 9a | dengue_4 | LwaCas13a | GATTTAGACTACCCCAAAA | ccttctggtgt | GATTTAGACTAC | Dengue | 9a |
| | 4 | | ACGAAGGGGACTAAAACcc | gttgatgttgt | CCCAAAAACGAA | ssRNA | |
| | | | ttctggtgtgttgatgttg | ccagca | GGGGACTAAAAC | | |
| | | | tccagca | | | | |
| 9a | dengue_4 | LwaCas13a | GATTTAGACTACCCCAAAA | tcccttctggt | GATTTAGACTAC | Dengue | 9a |
| | 5 | | ACGAAGGGGACTAAAACtc | gtgttgatgtt | CCCAAAAACGAA | ssRNA | |
| | | | ccttctggtgtgttgatgt | gtccag | GGGGACTAAAAC | | |
| | | | tgtccag | | | | |
| 9a | dengue_4 | LwaCas13a | GATTTAGACTACCCCAAAA | aatcccttct | GATTTAGACTAC | Dengue | 9a |
| | 6 | | ACGAAGGGGACTAAAACaa | ggtgtgttga | CCCAAAAACGAA | ssRNA | |
| | | | tcccttctggtgtgttgat | tgttgtcc | GGGGACTAAAAC | | |
| | | | gttgtcc | | | | |
| 9a | dengue_4 | LwaCas13a | GATTTAGACTACCCCAAAA | ataatcccttc | GATTTAGACTAC | Dengue | 9a |
| | 7 | | ACGAAGGGGACTAAAACat | tggtgtgttg | CCCAAAAACGAA | ssRNA | |
| | | | aatcccttctggtgtgttg | atgttgt | GGGGACTAAAAC | | |
| | | | atgttgt | | | | |
| 9a | dengue_4 | LwaCas13a | GATTTAGACTACCCCAAAA | gtataatccc | GATTTAGACTAC | Dengue | 9a |
| | 8 | | ACGAAGGGGACTAAAACgta | ttctggtgtgt | CCCAAAAACGAA | ssRNA | |
| | | | taatcccttctggtgtgtt | tgatgtt | GGGGACTAAAAC | | |
| | | | gatgtt | | | | |
| 9a | dengue_4 | LwaCas13a | GATTTAGACTACCCCAAAA | tggtataatc | GATTTAGACTAC | Dengue | 9a |
| | 9 | | ACGAAGGGGACTAAAACt | ccttctggtgt | CCCAAAAACGAA | ssRNA | |
| | | | ggtataatcccttctggtg | gttgatg | GGGGACTAAAAC | | |
| | | | tgttgatg | | | | |
| 9a | dengue_5 | LwaCas13a | GATTTAGACTACCCCAAAA | gctggtataa | GATTTAGACTAC | Dengue | 9a |
| | 0 | | ACGAAGGGGACTAAAACgc | tcccttctggt | CCCAAAAACGAA | ssRNA | |
| | | | tggtataatcccttctggt | gtgttga | GGGGACTAAAAC | | |
| | | | gtgttga | | | | |
| 9a | dengue_5 | LwaCas13a | GATTTAGACTACCCCAAAA | gagctggtat | GATTTAGACTAC | Dengue | 9a |
| | 1 | | ACGAAGGGGACTAAAACga | aatcccttct | CCCAAAAACGAA | ssRNA | |
| | | | gctggtataatcccttctg | ggtgtgtt | GGGGACTAAAAC | | |
| | | | gtgtgtt | | | | |
| 9a | dengue_5 | LwaCas13a | GATTTAGACTACCCCAAAA | gagagctgg | GATTTAGACTAC | Dengue | 9a |
| | 2 | | ACGAAGGGGACTAAAACga | tataatccctt | CCCAAAAACGAA | ssRNA | |
| | | | gagctggtataatcccttc | ctggtgtg | GGGGACTAAAAC | | |
| | | | tggtgtg | | | | |
| 9a | dengue_5 | LwaCas13a | GATTTAGACTACCCCAAAA | aagagagct | GATTTAGACTAC | Dengue | 9a |
| | 3 | | ACGAAGGGGACTAAAACaa | ggtataatcc | CCCAAAAACGAA | ssRNA | |
| | | | gagagctggtataatccct | cttctggtg | GGGGACTAAAAC | | |
| | | | tctggtg | | | | |
| 9a | dengue_5 | LwaCas13a | GATTTAGACTACCCCAAAA | caaagagag | GATTTAGACTAC | Dengue | 9a |
| | 4 | | ACGAAGGGGACTAAAACca | ctggtataat | CCCAAAAACGAA | ssRNA | |
| | | | aagagagctggtataatcc | cccttctgg | GGGGACTAAAAC | | |
| | | | cttctgg | | | | |
| 9a | dengue_5 | LwaCas13a | GATTTAGACTACCCCAAAA | ttcaaagaga | GATTTAGACTAC | Dengue | 9a |
| | 5 | | ACGAAGGGGACTAAAACtt | gctggtataa | CCCAAAAACGAA | ssRNA | |
| | | | caaagagagctggtataat | tcccttct | GGGGACTAAAAC | | |
| | | | cccttct | | | | |
| 9a | dengue_5 | LwaCas13a | GATTTAGACTACCCCAAAA | ggttcaaag | GATTTAGACTAC | Dengue | 9a |
| | 6 | | ACGAAGGGGACTAAAACgg | agagctggt | CCCAAAAACGAA | ssRNA | |
| | | | ttcaaagagagctggtata | ataatccctt | GGGGACTAAAAC | | |
| | | | atccctt | | | | |
| 9a | dengue_5 | LwaCas13a | GATTTAGACTACCCCAAAA | ctggttcaaa | GATTTAGACTAC | Dengue | 9a |
| | 7 | | ACGAAGGGGACTAAAACct | gagagctgg | CCCAAAAACGAA | ssRNA | |
| | | | ggttcaaagagagctggta | tataatccc | GGGGACTAAAAC | | |
| | | | taatccc | | | | |
| 9a | dengue_5 | LwaCas13a | GATTTAGACTACCCCAAAA | ttctggttcaa | GATTTAGACTAC | Dengue | 9a |
| | 8 | | ACGAAGGGGACTAAAACtt | agagagctg | CCCAAAAACGAA | ssRNA | |
| | | | ctggttcaaagagagctgg | gtataatc | GGGGACTAAAAC | | |
| | | | tataatc | | | | |
| 9a | dengue_5 | LwaCas13a | GATTTAGACTACCCCAAAA | ctttctggttc | GATTTAGACTAC | Dengue | 9a |
| | 9 | | ACGAAGGGGACTAAAACct | aaagagagc | CCCAAAAACGAA | ssRNA | |
| | | | ttctggttcaaagagagct | tggtataa | GGGGACTAAAAC | | |
| | | | ggtataa | | | | |
| 9a | dengue_6 | LwaCas13a | GATTTAGACTACCCCAAAA | ccctttctggt | GATTTAGACTAC | Dengue | 9a |
| | 0 | | ACGAAGGGGACTAAAACcc | tcaaagaga | CCCAAAAACGAA | ssRNA | |
| | | | ctttctggttcaaagagag | gctggtat | GGGGACTAAAAC | | |
| | | | ctggtat | | | | |
| 9a | dengue_6 | LwaCas13a | GATTTAGACTACCCCAAAA | ctccctttctg | GATTTAGACTAC | Dengue | 9a |
| | 1 | | ACGAAGGGGACTAAAACct | gttcaaaga | CCCAAAAACGAA | ssRNA | |
| | | | ccctttctggttcaaagag | gagctggt | GGGGACTAAAAC | | |
| | | | agctggt | | | | |
| 9a | dengue_6 | LwaCas13a | GATTTAGACTACCCCAAAA | ttctccctttct | GATTTAGACTAC | Dengue | 9a |
| | 2 | | ACGAAGGGGACTAAAACtt | ggttcaaag | CCCAAAAACGAA | ssRNA | |
| | | | ctccctttctggttcaaag | agagctg | GGGGACTAAAAC | | |
| | | | agagctg | | | | |
| 9a | dengue_6 | LwaCas13a | GATTTAGACTACCCCAAAA | acttctccctt | GATTTAGACTAC | Dengue | 9a |
| | 3 | | ACGAAGGGGACTAAAACac | tctggttcaa | CCCAAAAACGAA | ssRNA | |
| | | | ttctccctttctggttcaa | agagagc | GGGGACTAAAAC | | |
| | | | agagagc | | | | |
| 9a | dengue_6 | LwaCas13a | GATTTAGACTACCCCAAAA | tgacttctcc | GATTTAGACTAC | Dengue | 9a |
| | 4 | | ACGAAGGGGACTAAAACtg | ctttctggttc | CCCAAAAACGAA | ssRNA | |
| | | | acttctccctttctggttc | aaagaga | GGGGACTAAAAC | | |
| | | | aaagaga | | | | |
| 9a | dengue_6 | LwaCas13a | GATTTAGACTACCCCAAAA | ctgacttctc | GATTTAGACTAC | Dengue | 9a |
| | 5 | | ACGAAGGGGACTAAAACct | cctttctggtt | CCCAAAAACGAA | ssRNA | |
| | | | gacttctccctttctggtt | caaagag | GGGGACTAAAAC | | |
| | | | caaagag | | | | |
| 9a | dengue_6 | LwaCas13a | GATTTAGACTACCCCAAAA | gctgacttct | GATTTAGACTAC | Dengue | 9a |
| | 6 | | ACGAAGGGGACTAAAACgc | ccctttctggt | CCCAAAAACGAA | ssRNA | |
| | | | tgacttctccctttctggt | tcaaaga | GGGGACTAAAAC | | |
| | | | tcaaaga | | | | |
| 9a | dengue_6 | LwaCas13a | GATTTAGACTACCCCAAAA | ggctgacttc | GATTTAGACTAC | Dengue | 9a |
| | 7 | | ACGAAGGGGACTAAAACgg | tccctttctgg | CCCAAAAACGAA | ssRNA | |
| | | | ctgacttctccctttctgg | ttcaaag | GGGGACTAAAAC | | |
| | | | ttcaaag | | | | |
| 9a | dengue_6 | LwaCas13a | GATTTAGACTACCCCAAAA | cggctgactt | GATTTAGACTAC | Dengue | 9a |
| | 8 | | ACGAAGGGGACTAAAACcg | ctccctttctg | CCCAAAAACGAA | ssRNA | |
| | | | gctgacttctccctttctg | gttcaaa | GGGGACTAAAAC | | |
| | | | gttcaaa | | | | |
| 9a | dengue_6 | LwaCas13a | GATTTAGACTACCCCAAAA | gcggctgac | GATTTAGACTAC | Dengue | 9a |
| | 9 | | ACGAAGGGGACTAAAACgc | ttctccctttct | CCCAAAAACGAA | ssRNA | |
| | | | ggctgacttctccctttct | ggttcaa | GGGGACTAAAAC | | |
| | | | ggttcaa | | | | |
| 9a | dengue_7 | LwaCas13a | GATTTAGACTACCCCAAAA | ggcggctga | GATTTAGACTAC | Dengue | 9a |
| | 0 | | ACGAAGGGGACTAAAACgg | cttctcccttt | CCCAAAAACGAA | ssRNA | |
| | | | cggctgacttctccctttc | ctggttca | GGGGACTAAAAC | | |
| | | | tggttca | | | | |
| 9a | dengue_7 | LwaCas13a | GATTTAGACTACCCCAAAA | tggcggctg | GATTTAGACTAC | Dengue | 9a |
| | 1 | | ACGAAGGGGACTAAAACtg | acttctccctt | CCCAAAAACGAA | ssRNA | |
| | | | gcggctgacttctcccttt | tctggttc | GGGGACTAAAAC | | |
| | | | ctggttc | | | | |
| 9a | dengue_7 | LwaCas13a | GATTTAGACTACCCCAAAA | atggcggct | GATTTAGACTAC | Dengue | 9a |
| | 2 | | ACGAAGGGGACTAAAACat | gacttctccc | CCCAAAAACGAA | ssRNA | |
| | | | ggcggctgacttctccctt | tttctggtt | GGGGACTAAAAC | | |
| | | | tctggtt | | | | |
| 9a | dengue_7 | LwaCas13a | GATTTAGACTACCCCAAAA | tatggcggct | GATTTAGACTAC | Dengue | 9a |
| | 3 | | ACGAAGGGGACTAAAACta | gacttctccc | CCCAAAAACGAA | ssRNA | |
| | | | tggcggctgacttctccct | tttctggt | GGGGACTAAAAC | | |
| | | | ttctggt | | | | |
| 9a | dengue_7 | LwaCas13a | GATTTAGACTACCCCAAAA | ctatggcgg | GATTTAGACTAC | Dengue | 9a |
| | 4 | | ACGAAGGGGACTAAAACct | ctgacttctc | CCCAAAAACGAA | ssRNA | |
| | | | atggcggctgacttctccc | cctttctgg | GGGGACTAAAAC | | |
| | | | tttctgg | | | | |
| 9a | dengue_7 | LwaCas13a | GATTTAGACTACCCCAAAA | tctatggcgg | GATTTAGACTAC | Dengue | 9a |
| | 5 | | ACGAAGGGGACTAAAACtc | ctgacttctc | CCCAAAAACGAA | ssRNA | |
| | | | tatggcggctgacttctcc | cctttctg | GGGGACTAAAAC | | |
| | | | ctttctg | | | | |
| 9a | dengue_7 | LwaCas13a | GATTTAGACTACCCCAAAA | gtctatggcg | GATTTAGACTAC | Dengue | 9a |
| | 6 | | ACGAAGGGGACTAAAACgt | gctgacttct | CCCAAAAACGAA | ssRNA | |
| | | | ctatggcggctgacttctc | ccctttct | GGGGACTAAAAC | | |
| | | | cctttct | | | | |
| 9a | dengue_7 | LwaCas13a | GATTTAGACTACCCCAAAA | cgtctatggc | GATTTAGACTAC | Dengue | 9a |
| | 7 | | ACGAAGGGGACTAAAACcg | ggctgacttc | CCCAAAAACGAA | ssRNA | |
| | | | tctatggcggctgacttct | tccctttc | GGGGACTAAAAC | | |
| | | | ccctttc | | | | |
| 9a | dengue_7 | LwaCas13a | GATTTAGACTACCCCAAAA | ccgtctatgg | GATTTAGACTAC | Dengue | 9a |
| | 8 | | ACGAAGGGGACTAAAACcc | cggctgactt | CCCAAAAACGAA | ssRNA | |
| | | | gtctatggcggctgacttc | ctcccttt | GGGGACTAAAAC | | |
| | | | tcccttt | | | | |
| 9a | dengue_7 | LwaCas13a | GATTTAGACTACCCCAAAA | accgtctatg | GATTTAGACTAC | Dengue | 9a |
| | 9 | | ACGAAGGGGACTAAAACac | gcggctgac | CCCAAAAACGAA | ssRNA | |
| | | | cgtctatggcggctgactt | ttctccctt | GGGGACTAAAAC | | |
| | | | ctccctt | | | | |
| 9a | dengue_8 | LwaCas13a | GATTTAGACTACCCCAAAA | caccgtctat | GATTTAGACTAC | Dengue | 9a |
| | 0 | | ACGAAGGGGACTAAAACca | ggcggctga | CCCAAAAACGAA | ssRNA | |
| | | | ccgtctatggcggctgact | cttctccct | GGGGACTAAAAC | | |
| | | | tctccct | | | | |
| 9a | dengue_8 | LwaCas13a | GATTTAGACTACCCCAAAA | tcaccgtcta | GATTTAGACTAC | Dengue | 9a |
| | 1 | | ACGAAGGGGACTAAAACtc | tggcggctg | CCCAAAAACGAA | ssRNA | |
| | | | accgtctatggcggctgac | acttctccc | GGGGACTAAAAC | | |
| | | | ttctccc | | | | |
| 9a | dengue_8 | LwaCas13a | GATTTAGACTACCCCAAAA | ttcaccgtct | GATTTAGACTAC | Dengue | 9a |
| | 2 | | ACGAAGGGGACTAAAACtt | atggcggct | CCCAAAAACGAA | ssRNA | |
| | | | caccgtctatggcggctga | gacttctcc | GGGGACTAAAAC | | |
| | | | cttctcc | | | | |
| 9a | dengue_8 | LwaCas13a | GATTTAGACTACCCCAAAA | attcaccgtc | GATTTAGACTAC | Dengue | 9a |
| | 3 | | ACGAAGGGGACTAAAACat | tatggcggct | CCCAAAAACGAA | ssRNA | |
| | | | tcaccgtctatggcggctg | gacttctc | GGGGACTAAAAC | | |
| | | | acttctc | | | | |
| 9a | dengue_8 | LwaCas13a | GATTTAGACTACCCCAAAA | tattcaccgt | GATTTAGACTAC | Dengue | 9a |
| | 4 | | ACGAAGGGGACTAAAACta | ctatggcgg | CCCAAAAACGAA | ssRNA | |
| | | | ttcaccgtctatggcggct | ctgacttct | GGGGACTAAAAC | | |
| | | | gacttct | | | | |
| 9a | dengue_8 | LwaCas13a | GATTTAGACTACCCCAAAA | gtattcaccg | GATTTAGACTAC | Dengue | 9a |
| | 5 | | ACGAAGGGGACTAAAACgt | tctatggcgg | CCCAAAAACGAA | ssRNA | |
| | | | attcaccgtctatggcggc | ctgacttc | GGGGACTAAAAC | | |
| | | | tgacttc | | | | |
| 9a | dengue_8 | LwaCas13a | GATTTAGACTACCCCAAAA | ggtattcacc | GATTTAGACTAC | Dengue | 9a |
| | 6 | | ACGAAGGGGACTAAAACgg | gtctatggcg | CCCAAAAACGAA | ssRNA | |
| | | | tattcaccgtctatggcgg | gctgactt | GGGGACTAAAAC | | |
| | | | ctgactt | | | | |
| 9a | dengue_8 | LwaCas13a | GATTTAGACTACCCCAAAA | cggtattcac | GATTTAGACTAC | Dengue | 9a |
| | 7 | | ACGAAGGGGACTAAAACcg | cgtctatggc | CCCAAAAACGAA | ssRNA | |
| | | | gtattcaccgtctatggcg | ggctgact | GGGGACTAAAAC | | |
| | | | gctgact | | | | |
| 9a | dengue_8 | LwaCas13a | GATTTAGACTACCCCAAAA | gcggtattca | GATTTAGACTAC | Dengue | 9a |
| | 8 | | ACGAAGGGGACTAAAACgc | ccgtctatgg | CCCAAAAACGAA | ssRNA | |
| | | | ggtattcaccgtctatggc | cggctgac | GGGGACTAAAAC | | |
| | | | ggctgac | | | | |
| 9a | dengue_8 | LwaCas13a | GATTTAGACTACCCCAAAA | ggcggtattc | GATTTAGACTAC | Dengue | 9a |
| | 9 | | ACGAAGGGGACTAAAACgg | accgtctatg | CCCAAAAACGAA | ssRNA | |
| | | | cggtattcaccgtctatgg | gcggctga | GGGGACTAAAAC | | |
| | | | cggctga | | | | |
| 9a | dengue_9 | LwaCas13a | GATTTAGACTACCCCAAAA | aggcggtatt | GATTTAGACTAC | Dengue | 9a |
| | 0 | | ACGAAGGGGACTAAAACag | caccgtctat | CCCAAAAACGAA | ssRNA | |
| | | | gcggtattcaccgtctatg | ggcggctg | GGGGACTAAAAC | | |
| | | | gcggctg | | | | |
| 9a | dengue_9 | LwaCas13a | GATTTAGACTACCCCAAAA | caggcggta | GATTTAGACTAC | Dengue | 9a |
| | 1 | | ACGAAGGGGACTAAAACca | ttcaccgtct | CCCAAAAACGAA | ssRNA | |
| | | | ggcggtattcaccgtctat | atggcggct | GGGGACTAAAAC | | |
| | | | ggcggct | | | | |
| 9a | dengue_9 | LwaCas13a | GATTTAGACTACCCCAAAA | tcaggcggt | GATTTAGACTAC | Dengue | 9a |
| | 2 | | ACGAAGGGGACTAAAACtc | attcaccgtc | CCCAAAAACGAA | ssRNA | |
| | | | aggcggtattcaccgtcta | tatggcggc | GGGGACTAAAAC | | |
| | | | tggcggc | | | | |
| 9a | dengue_9 | LwaCas13a | GATTTAGACTACCCCAAAA | ttcaggcggt | GATTTAGACTAC | Dengue | 9a |
| | 3 | | ACGAAGGGGACTAAAACtt | attcaccgtc | CCCAAAAACGAA | ssRNA | |
| | | | caggcggtattcaccgtct | tatggcgg | GGGGACTAAAAC | | |
| | | | atggcgg | | | | |
| 9a | dengue_9 | LwaCas13a | GATTTAGACTACCCCAAAA | cttcaggcg | GATTTAGACTAC | Dengue | 9a |
| | 4 | | ACGAAGGGGACTAAAACct | gtattcaccg | CCCAAAAACGAA | ssRNA | |
| | | | tcaggcggtattcaccgtc | tctatggcg | GGGGACTAAAAC | | |
| | | | tatggcg | | | | |
| 9a | dengue_9 | LwaCas13a | GATTTAGACTACCCCAAAA | ccttcaggc | GATTTAGACTAC | Dengue | 9a |
| | 5 | | ACGAAGGGGACTAAAACcc | ggtattcacc | CCCAAAAACGAA | ssRNA | |
| | | | ttcaggcggtattcaccgt | gtctatggc | GGGGACTAAAAC | | |
| | | | ctatggc | | | | |
| 11b | Ebola_GP | LwaCas13a | GATTTAGACTACCCCAAAA | ctgtgaaag | GATTTAGACTAC | Ebola | 1b |
| | _guide_01 | | ACGAAGGGGACTAAAACct | acaactcttc | CCCAAAAACGAA | ssRNA | |
| | | | gtgaaagacaactcttcac | actgcgaat | GGGGACTAAAAC | | |
| | | | tgcgaat | | | | |
| 11b | Ebola_GP | LwaCas13a | GATTTAGACTACCCCAAAA | gatacaactg | GATTTAGACTAC | Ebola | 1b |
| | _guide_06 | | ACGAAGGGGACTAAAACga | tgaaagaca | CCCAAAAACGAA | ssRNA | |
| | | | tacaactgtgaaagacaac | actcttcac | GGGGACTAAAAC | | |
| | | | tcttcac | | | | |
| 11b | Ebola_GP | LwaCas13a | GATTTAGACTACCCCAAAA | tgatacaact | GATTTAGACTAC | Ebola | 1b |
| | _guide_07 | | ACGAAGGGGACTAAAACtg | gtgaaagac | CCCAAAAACGAA | ssRNA | |
| | | | atacaactgtgaaagacaa | aactcttca | GGGGACTAAAAC | | |
| | | | ctcttca | | | | |
| 11b | Ebola_GP | LwaCas13a | GATTTAGACTACCCCAAAA | tttgatacaa | GATTTAGACTAC | Ebola | 1b |
| | _guide_08 | | ACGAAGGGGACTAAAACtt | ctgtgaaag | CCCAAAAACGAA | ssRNA | |
| | | | tgatacaactgtgaaagac | acaactctt | GGGGACTAAAAC | | |
| | | | aactctt | | | | |
| 11b | Ebola_GP | LwaCas13a | GATTTAGACTACCCCAAAA | tccgtttgata | GATTTAGACTAC | Ebola | 1b |
| | _guide_11 | | ACGAAGGGGACTAAAACtc | caactgtgaa | CCCAAAAACGAA | ssRNA | |
| | | | cgtttgatacaactgtgaa | agacaac | GGGGACTAAAAC | | |
| | | | agacaac | | | | |
| l1b | Ebola_GP | LwaCas13a | GATTTAGACTACCCCAAAA | ggctccgttt | GATTTAGACTAC | Ebola | 1b |
| | _guide_13 | | ACGAAGGGGACTAAAACgg | gatacaactg | CCCAAAAACGAA | ssRNA | |
| | | | ctccgtttgatacaactgt | tgaaagac | GGGGACTAAAAC | | |
| | | | gaaagac | | | | |
| 11b | Ebola_GP | LwaCas13a | GATTTAGACTACCCCAAAA | ccactgatgt | GATTTAGACTAC | Ebola | 1b |
| | _guide_20 | | ACGAAGGGGACTAAAACcc | ttttggctccg | CCCAAAAACGAA | ssRNA | |
| | | | actgatgtttttggctccg | tttgata | GGGGACTAAAAC | | |
| | | | tttgata | | | | |
| 11b | Ebola_GP | LwaCas13a | GATTTAGACTACCCCAAAA | accactgatg | GATTTAGACTAC | Ebola | 1b |
| | _guide_21 | | ACGAAGGGGACTAAAACac | tttttggctcc | CCCAAAAACGAA | ssRNA | |
| | | | cactgatgtttttggctcc | gtttgat | GGGGACTAAAAC | | |
| | | | gtttgat | | | | |
| 11b | Ebola_GP | LwaCas13a | GATTTAGACTACCCCAAAA | gaccactgat | GATTTAGACTAC | Ebola | 1b |
| | _guide_22 | | ACGAAGGGGACTAAAACga | gtttttggctc | CCCAAAAACGAA | ssRNA | |
| | | | ccactgatgtttttggctc | cgtttga | GGGGACTAAAAC | | |
| | | | cgtttga | | | | |
| 11b | Ebola_GP | LwaCas13a | GATTTAGACTACCCCAAAA | ctgaccactg | GATTTAGACTAC | Ebola | 1b |
| | _guide_23 | | ACGAAGGGGACTAAAACct | atgtttttggc | CCCAAAAACGAA | ssRNA | |
| | | | gaccactgatgtttttggc | tccgttt | GGGGACTAAAAC | | |
| | | | tccgttt | | | | |
| 11b | Ebola_GP | LwaCas13a | GATTTAGACTACCCCAAAA | ctctgaccac | GATTTAGACTAC | Ebola | 1b |
| | _guide_25 | | ACGAAGGGGACTAAAACct | tgatgtttttg | CCCAAAAACGAA | ssRNA | |
| | | | ctgaccactgatgtttttg | gctccgt | GGGGACTAAAAC | | |
| | | | gctccgt | | | | |
| 11b | Ebola_GP | LwaCas13a | GATTTAGACTACCCCAAAA | cgccggact | GATTTAGACTAC | Ebola | 1b |
| | _guide_30 | | ACGAAGGGGACTAAAACcg | ctgaccactg | CCCAAAAACGAA | ssRNA | |
| | | | ccggactctgaccactgat | gatgtttttg | GGGGACTAAAAC | | |
| | | | tttttg | | | | |
| 11b | Ebola_GP | LwaCas13a | GATTTAGACTACCCCAAAA | cgcgccgga | GATTTAGACTAC | Ebola | 1b |
| | _guide_31 | | ACGAAGGGGACTAAAACcg | ctctgaccac | CCCAAAAACGAA | ssRNA | |
| | | | cgccggactctgaccactg | tgatgtttt | GGGGACTAAAAC | | |
| | | | atgtttt | | | | |
| 11b | Ebola_GP | LwaCas13a | GATTTAGACTACCCCAAAA | ttcgcgccg | GATTTAGACTAC | Ebola | 1b |
| | _guide_32 | | ACGAAGGGGACTAAAACtt | gactctgacc | CCCAAAAACGAA | ssRNA | |
| | | | cgcgccggactctgaccac | actgatgtt | GGGGACTAAAAC | | |
| | | | tgatgtt | | | | |
| 11b | Ebola_GP | LwaCas13a | GATTTAGACTACCCCAAAA | gttcgcgcc | GATTTAGACTAC | Ebola | 1b |
| | _guide_33 | | ACGAAGGGGACTAAAACgt | ggactctga | CCCAAAAACGAA | ssRNA | |
| | | | tcgcgccggactctgacca | ccactgatgt | GGGGACTAAAAC | | |
| | | | ctgatgt | | | | |
| 11b | Ebola_GP | LwaCas13a | GATTTAGACTACCCCAAAA | agttcgcgc | GATTTAGACTAC | Ebola | 1b |
| | _guide_34 | | ACGAAGGGGACTAAAACag | cggactctg | CCCAAAAACGAA | ssRNA | |
| | | | ttcgcgccggactctgacc | accactgatg | GGGGACTAAAAC | | |
| | | | actgatg | | | | |
| 11b | Ebola_GP | LwaCas13a | GATTTAGACTACCCCAAAA | aagttcgcg | GATTTAGACTAC | Ebola | 1b |
| | _guide_35 | | ACGAAGGGGACTAAAACaa | ccggactct | CCCAAAAACGAA | ssRNA | |
| | | | gttcgcgccggactctgac | gaccactgat | GGGGACTAAAAC | | |
| | | | cactgat | | | | |
| 11b | Ebola_GP | LwaCas13a | GATTTAGACTACCCCAAAA | agaagttcg | GATTTAGACTAC | Ebola | 1b |
| | _guide_36 | | ACGAAGGGGACTAAAACag | cgccggact | CCCAAAAACGAA | ssRNA | |
| | | | aagttcgcgccggactctg | ctgaccactg | GGGGACTAAAAC | | |
| | | | accactg | | | | |
| 11b | Ebola_GP | LwaCas13a | GATTTAGACTACCCCAAAA | ggtcggaag | GATTTAGACTAC | Ebola | 1b |
| | _guide_42 | | ACGAAGGGGACTAAAACgg | aagttcgcg | CCCAAAAACGAA | ssRNA | |
| | | | tcggaagaagttcgcgccg | ccggactct | GGGGACTAAAAC | | |
| | | | gactctg | g | | | |
| 11b | Ebola_GP | LwaCas13a | GATTTAGACTACCCCAAAA | ctgggtcgg | GATTTAGACTAC | Ebola | 1b |
| | _guide_43 | | ACGAAGGGGACTAAAACct | aagaagttc | CCCAAAAACGAA | ssRNA | |
| | | | gggtcggaagaagttcgcg | gcgccggac | GGGGACTAAAAC | | |
| | | | ccggact | t | | | |
| 11b | Ebola_GP | LwaCas13a | GATTTAGACTACCCCAAAA | cctgggtcg | GATTTAGACTAC | Ebola | 1b |
| | _guide_44 | | ACGAAGGGGACTAAAACcc | gaagaagtt | CCCAAAAACGAA | ssRNA | |
| | | | tgggtcggaagaagttcgc | cgcgccgga | GGGGACTAAAAC | | |
| | | | gccggac | c | | | |
| 11b | Ebola_GP | LwaCas13a | GATTTAGACTACCCCAAAA | ccctgggtc | GATTTAGACTAC | Ebola | 1b |
| | _guide_45 | | ACGAAGGGGACTAAAACcc | ggaagaagt | CCCAAAAACGAA | ssRNA | |
| | | | ctgggtcggaagaagttcg | tcgcgccgg | GGGGACTAAAAC | | |
| | | | cgccgga | a | | | |
| 11b | Ebola_GP | LwaCas13a | GATTTAGACTACCCCAAAA | tccctgggtc | GATTTAGACTAC | Ebola | 1b |
| | _guide_46 | | ACGAAGGGGACTAAAACtcc | ggaagaagt | CCCAAAAACGAA | ssRNA | |
| | | | ctgggtcggaagaagttcg | tcgcgccgg | GGGGACTAAAAC | | |
| | | | cgccgg | | | | |
| 11b | Ebola_GP | LwaCas13a | GATTTAGACTACCCCAAAA | ggtccctgg | GATTTAGACTAC | Ebola | 1b |
| | _guide_48 | | ACGAAGGGGACTAAAACgg | gtcggaaga | CCCAAAAACGAA | ssRNA | |
| | | | tccctgggtcggaagaagt | agttcgcgc | GGGGACTAAAAC | | |
| | | | tcgcgcc | c | | | |
| 11b | Ebola_GP | LwaCas13a | GATTTAGACTACCCCAAAA | gttggtccct | GATTTAGACTAC | Ebola | 1b |
| | _guide_49 | | ACGAAGGGGACTAAAACgt | gggtcggaa | CCCAAAAACGAA | ssRNA | |
| | | | tggtccctgggtcggaaga | gaagttcgc | GGGGACTAAAAC | | |
| | | | agttcgc | | | | |
| 11b | Ebola_GP | LwaCas13a | GATTTAGACTACCCCAAAA | agttgttgtgt | GATTTAGACTAC | Ebola | 1b |
| | _guide_55 | | ACGAAGGGGACTAAAACag | tggtccctgg | CCCAAAAACGAA | ssRNA | |
| | | | ttgttgtgttggtccctgg | gtcggaa | GGGGACTAAAAC | | |
| | | | gtcggaa | | | | |
| 11b | Ebola_GP | LwaCas13a | GATTTAGACTACCCCAAAA | tcagttgttgt | GATTTAGACTAC | Ebola | 1b |
| | _guide_57 | | ACGAAGGGGACTAAAACtc | gttggtccct | CCCAAAAACGAA | ssRNA | |
| | | | agttgttgtgttggtccct | gggtcgg | GGGGACTAAAAC | | |
| | | | gggtcgg | | | | |
| 11b | Ebola_GP | LwaCas13a | GATTTAGACTACCCCAAAA | ttcagttgttg | GATTTAGACTAC | Ebola | 1b |
| | _guide_58 | | ACGAAGGGGACTAAAACtt | tgttggtccct | CCCAAAAACGAA | ssRNA | |
| | | | cagttgttgtgttggtccc | gggtcg | GGGGACTAAAAC | | |
| | | | tgggtcg | | | | |
| 11b | Ebola_GP | LwaCas13a | GATTTAGACTACCCCAAAA | cttcagttgtt | GATTTAGACTAC | Ebola | 1b |
| | _guide_59 | | ACGAAGGGGACTAAAACct | gtgttggtcc | CCCAAAAACGAA | ssRNA | |
| | | | tcagttgttgtgttggtcc | ctgggtc | GGGGACTAAAAC | | |
| | | | ctgggtc | | | | |
| 11b | Ebola_GP | LwaCas13a | GATTTAGACTACCCCAAAA | tcttcagttgt | GATTTAGACTAC | Ebola | 1b |
| | _guide_60 | | ACGAAGGGGACTAAAACtc | tgtgttggtc | CCCAAAAACGAA | ssRNA | |
| | | | ttcagttgttgtgttggtc | cctgggt | GGGGACTAAAAC | | |
| | | | cctgggt | | | | |
| 11b | Ebola_GP | LwaCas13a | GATTTAGACTACCCCAAAA | tggtcttcagt | GATTTAGACTAC | Ebola | 1b |
| | _guide_61 | | ACGAAGGGGACTAAAACtg | tgttgtgttgg | CCCAAAAACGAA | ssRNA | |
| | | | gtcttcagttgttgtgttg | tccctg | GGGGACTAAAAC | | |
| | | | gtccctg | | | | |
| 11b | Ebola_GP | LwaCas13a | GATTTAGACTACCCCAAAA | attttgtggtc | GATTTAGACTAC | Ebola | 1b |
| | _guide_66 | | ACGAAGGGGACTAAAACat | ttcagttgttg | CCCAAAAACGAA | ssRNA | |
| | | | tttgtggtcttcagttgtt | tgttgg | GGGGACTAAAAC | | |
| | | | gtgttgg | | | | |
| 11b | Ebola_GP | LwaCas13a | GATTTAGACTACCCCAAAA | gccatgatttt | GATTTAGACTAC | Ebola | 1b |
| | _guide_70 | | ACGAAGGGGACTAAAACgc | gtggtcttca | CCCAAAAACGAA | ssRNA | |
| | | | catgattttgtggtcttca | gttgttg | GGGGACTAAAAC | | |
| | | | gttgttg | | | | |
| 11b | Ebola_GP | LwaCas13a | GATTTAGACTACCCCAAAA | aagccatgat | GATTTAGACTAC | Ebola | 1b |
| | _guide_72 | | ACGAAGGGGACTAAAACaa | tttgtggtctt | CCCAAAAACGAA | ssRNA | |
| | | | gccatgattttgtggtctt | cagttgt | GGGGACTAAAAC | | |
| | | | cagttgt | | | | |
| 11b | Ebola_GP | LwaCas13a | GATTTAGACTACCCCAAAA | ctgaagccat | GATTTAGACTAC | Ebola | 1b |
| | _guide_73 | | ACGAAGGGGACTAAAACct | gattttgtggt | CCCAAAAACGAA | ssRNA | |
| | | | gaagccatgattttgtggt | cttcagt | GGGGACTAAAAC | | |
| | | | cttcagt | | | | |
| 11b | Ebola_GP | LwaCas13a | GATTTAGACTACCCCAAAA | gaattttctga | GATTTAGACTAC | Ebola | 1b |
| | _guide_78 | | ACGAAGGGGACTAAAACga | agccatgatt | CCCAAAAACGAA | ssRNA | |
| | | | attttctgaagccatgatt | ttgtggt | GGGGACTAAAAC | | |
| | | | ttgtggt | | | | |
| 11b | Ebola_GP | LwaCas13a | GATTTAGACTACCCCAAAA | agaggaattt | GATTTAGACTAC | Ebola | 1b |
| | _guide_81 | | ACGAAGGGGACTAAAACag | tctgaagcca | CCCAAAAACGAA | ssRNA | |
| | | | aggaattttctgaagccat | tgattttg | GGGGACTAAAAC | | |
| | | | gattttg | | | | |
| 11b | Ebola_GP | LwaCas13a | GATTTAGACTACCCCAAAA | cagaggaat | GATTTAGACTAC | Ebola | 1b |
| | _guide_82 | | ACGAAGGGGACTAAAACca | tttctgaagc | CCCAAAAACGAA | ssRNA | |
| | | | gaggaattttctgaagcca | catgatttt | GGGGACTAAAAC | | |
| | | | tgatttt | | | | |
| 11b | Ebola_GP | LwaCas13a | GATTTAGACTACCCCAAAA | cattgcaga | GATTTAGACTAC | Ebola | 1b |
| | _guide_85 | | ACGAAGGGGACTAAAACca | ggaattttctg | CCCAAAAACGAA | ssRNA | |
| | | | ttgcagaggaattttctga | aagccatg | GGGGACTAAAAC | | |
| | | | agccatg | | | | |
| 11b | Ebola_GP | LwaCas13a | GATTTAGACTACCCCAAAA | cacttgaacc | GATTTAGACTAC | Ebola | 1b |
| | _guide_90 | | ACGAAGGGGACTAAAACca | attgcagag | CCCAAAAACGAA | ssRNA | |
| | | | cttgaaccattgcagagga | gaattttct | GGGGACTAAAAC | | |
| | | | attttct | | | | |
| 9a | ssRNA1_ | LwaCas13a | GATTTAGACTACCCCAAAA | ccccgggta | GATTTAGACTAC | ssRNA1 | 9a |
| | guide_01 | | ACGAAGGGGACTAAAACcc | ccgagctcg | CCCAAAAACGAA | | |
| | | | ccgggtaccgagctcgaat | aattcactgg | GGGGACTAAAAC | | |
| | | | tcactgg | | | | |
| 9a | ssRNA1_ | LwaCas13a | GATTTAGACTACCCCAAAA | tccccgggt | GATTTAGACTAC | ssRNA1 | 9a |
| | guide_02 | | ACGAAGGGGACTAAAACtc | accgagctc | CCCAAAAACGAA | | |
| | | | cccgggtaccgagctcgaa | gaattcactg | GGGGACTAAAAC | | |
| | | | ttcactg | | | | |
| 9a | ssRNA1_ | LwaCas13a | GATTTAGACTACCCCAAAA | atccccggg | GATTTAGACTAC | ssRNA1 | 9a |
| | guide_03 | | ACGAAGGGGACTAAAACat | taccgagctc | CCCAAAAACGAA | | |
| | | | ccccgggtaccgagctcga | gaattcact | GGGGACTAAAAC | | |
| | | | attcact | | | | |
| 9a | ssRNA1_ | LwaCas13a | GATTTAGACTACCCCAAAA | aggatcccc | GATTTAGACTAC | ssRNA1 | 9a |
| | guide_04 | | ACGAAGGGGACTAAAACag | gggtaccga | CCCAAAAACGAA | | |
| | | | gatccccgggtaccgagct | gctcgaattc | GGGGACTAAAAC | | |
| | | | cgaattc | | | | |
| 9a | ssRNA1_ | LwaCas13a | GATTTAGACTACCCCAAAA | agaggatcc | GATTTAGACTAC | ssRNA1 | 9a |
| | guide_05 | | ACGAAGGGGACTAAAACag | ccgggtacc | CCCAAAAACGAA | | |
| | | | aggatccccgggtaccgag | gagctcgaa | GGGGACTAAAAC | | |
| | | | ctcgaat | t | | | |
| 9a | ssRNA1_ | LwaCas13a | GATTTAGACTACCCCAAAA | tctagaggat | GATTTAGACTAC | ssRNA1 | 9a |
| | guide_06 | | ACGAAGGGGACTAAAACtc | ccccgggta | CCCAAAAACGAA | | |
| | | | tagaggatccccgggtacc | ccgagctcg | GGGGACTAAAAC | | |
| | | | gagctcg | | | | |
| 9a | ssRNA1_ | LwaCas13a | GATTTAGACTACCCCAAAA | ttctagagga | GATTTAGACTAC | ssRNA1 | 9a |
| | guide_07 | | ACGAAGGGGACTAAAACtt | tccccgggt | CCCAAAAACGAA | | |
| | | | ctagaggatccccgggtac | accgagctc | GGGGACTAAAAC | | |
| | | | cgagctc | | | | |
| 9a | ssRNA1_ | LwaCas13a | GATTTAGACTACCCCAAAA | atttctagag | GATTTAGACTAC | ssRNA1 | 9a |
| | guide_08 | | ACGAAGGGGACTAAAACat | gatccccgg | CCCAAAAACGAA | | |
| | | | ttctagaggatccccgggt | gtaccgagc | GGGGACTAAAAC | | |
| | | | accgagc | | | | |
| 9a | ssRNA1_ | LwaCas13a | GATTTAGACTACCCCAAAA | tatttctagag | GATTTAGACTAC | ssRNA1 | 9a |
| | guide_09 | | ACGAAGGGGACTAAAACta | gatccccgg | CCCAAAAACGAA | | |
| | | | tttctagaggatccccggg | gtaccgag | GGGGACTAAAAC | | |
| | | | taccgag | | | | |
| 9a | ssRNA1_ | LwaCas13a | GATTTAGACTACCCCAAAA | ccatatttcta | GATTTAGACTAC | ssRNA1 | 9a |
| | guide_10 | | ACGAAGGGGACTAAAACcc | gaggatccc | CCCAAAAACGAA | | |
| | | | atatttctagaggatcccc | cgggtacc | GGGGACTAAAAC | | |
| | | | gggtacc | | | | |
| 9a | ssRNA1_ | LwaCas13a | GATTTAGACTACCCCAAAA | tccatatttct | GATTTAGACTAC | ssRNA1 | 9a |
| | guide_11 | | ACGAAGGGGACTAAAACtc | agaggatcc | CCCAAAAACGAA | | |
| | | | catatttctagaggatccc | ccgggtac | GGGGACTAAAAC | | |
| | | | cgggtac | | | | |
| 9a | ssRNA1_ | LwaCas13a | GATTTAGACTACCCCAAAA | atccatatttc | GATTTAGACTAC | ssRNA1 | 9a |
| | guide_12 | | ACGAAGGGGACTAAAACat | tagaggatc | CCCAAAAACGAA | | |
| | | | ccatatttctagaggatcc | cccgggta | GGGGACTAAAAC | | |
| | | | ccgggta | | | | |
| 9a | ssRNA1_ | LwaCas13a | GATTTAGACTACCCCAAAA | taatccatatt | GATTTAGACTAC | ssRNA1 | 9a |
| | guide_13 | | ACGAAGGGGACTAAAACta | tctagaggat | CCCAAAAACGAA | | |
| | | | atccatatttctagaggat | ccccggg | GGGGACTAAAAC | | |
| | | | ccccggg | | | | |
| 9a | ssRNA1_ | LwaCas13a | GATTTAGACTACCCCAAAA | gtaatccata | GATTTAGACTAC | ssRNA1 | 9a |
| | guide_14 | | ACGAAGGGGACTAAAACgt | tttctagagg | CCCAAAAACGAA | | |
| | | | aatccatatttctagagga | atccccgg | GGGGACTAAAAC | | |
| | | | tccccgg | | | | |
| 9a | ssRNA1_ | LwaCas13a | GATTTAGACTACCCCAAAA | taccaagtaa | GATTTAGACTAC | ssRNA1 | 9a |
| | guide_15 | | ACGAAGGGGACTAAAACta | tccatatttct | CCCAAAAACGAA | | |
| | | | ccaagtaatccatatttct | agaggat | GGGGACTAAAAC | | |
| | | | agaggat | | | | |
| 9a | ssRNA1_ | LwaCas13a | GATTTAGACTACCCCAAAA | tctaccaagt | GATTTAGACTAC | ssRNA1 | 9a |
| | guide_16 | | ACGAAGGGGACTAAAACtc | aatccatattt | CCCAAAAACGAA | | |
| | | | taccaagtaatccatattt | ctagagg | GGGGACTAAAAC | | |
| | | | ctagagg | | | | |
| 9a | ssRNA1_ | LwaCas13a | GATTTAGACTACCCCAAAA | gttctaccaa | GATTTAGACTAC | ssRNA1 | 9a |
| | guide_17 | | ACGAAGGGGACTAAAACgt | gtaatccata | CCCAAAAACGAA | | |
| | | | tctaccaagtaatccatat | tttctaga | GGGGACTAAAAC | | |
| | | | ttctaga | | | | |
| 9a | ssRNA1_ | LwaCas13a | GATTTAGACTACCCCAAAA | gctgttctac | GATTTAGACTAC | ssRNA1 | 9a |
| | guide_18 | | ACGAAGGGGACTAAAACgc | caagtaatcc | CCCAAAAACGAA | | |
| | | | tgttctaccaagtaatcca | atatttct | GGGGACTAAAAC | | |
| | | | tatttct | | | | |
| 9a | ssRNA1_ | LwaCas13a | GATTTAGACTACCCCAAAA | attgctgttct | GATTTAGACTAC | ssRNA1 | 9a |
| | guide_20 | | ACGAAGGGGACTAAAACat | accaagtaat | CCCAAAAACGAA | | |
| | | | tgctgttctaccaagtaat | ccatatt | GGGGACTAAAAC | | |
| | | | ccatatt | | | | |
| 9a | ssRNA1_ | LwaCas13a | GATTTAGACTACCCCAAAA | tagattgctgt | GATTTAGACTAC | ssRNA1 | 9a |
| | guide_21 | | ACGAAGGGGACTAAAACta | tctaccaagt | CCCAAAAACGAA | | |
| | | | gattgctgttctaccaagt | aatccat | GGGGACTAAAAC | | |
| | | | aatccat | | | | |
| 9a | ssRNA1_ | LwaCas13a | GATTTAGACTACCCCAAAA | gtagattgct | GATTTAGACTAC | ssRNA1 | 9a |
| | guide_22 | | ACGAAGGGGACTAAAACgt | gttctaccaa | CCCAAAAACGAA | | |
| | | | agattgctgttctaccaag | gtaatcca | GGGGACTAAAAC | | |
| | | | taatcca | | | | |
| 9a | ssRNA1_ | LwaCas13a | GATTTAGACTACCCCAAAA | agtagattgc | GATTTAGACTAC | ssRNA1 | 9a |
| | guide_23 | | ACGAAGGGGACTAAAACag | tgttctacca | CCCAAAAACGAA | | |
| | | | tagattgctgttctaccaa | agtaatcc | GGGGACTAAAAC | | |
| | | | gtaatcc | | | | |
| 9a | ssRNA1_ | LwaCas13a | GATTTAGACTACCCCAAAA | gagtagattg | GATTTAGACTAC | ssRNA1 | 9a |
| | guide_24 | | ACGAAGGGGACTAAAACga | ctgttctacc | CCCAAAAACGAA | | |
| | | | gtagattgctgttctacca | aagtaatc | GGGGACTAAAAC | | |
| | | | agtaatc | | | | |
| 9a | ssRNA1_ | LwaCas13a | GATTTAGACTACCCCAAAA | tcgagtagat | GATTTAGACTAC | ssRNA1 | 9a |
| | guide_25 | | ACGAAGGGGACTAAAACtc | tgctgttctac | CCCAAAAACGAA | | |
| | | | gagtagattgctgttctac | caagtaa | GGGGACTAAAAC | | |
| | | | caagtaa | | | | |
| 9a | ssRNA1_ | LwaCas13a | GATTTAGACTACCCCAAAA | gtcgagtag | GATTTAGACTAC | ssRNA1 | 9a |
| | guide_26 | | ACGAAGGGGACTAAAACgt | attgctgttct | CCCAAAAACGAA | | |
| | | | cgagtagattgctgttcta | accaagta | GGGGACTAAAAC | | |
| | | | ccaagta | | | | |
| 9a | ssRNA1_ | LwaCas13a | GATTTAGACTACCCCAAAA | caggtcgag | GATTTAGACTAC | ssRNA1 | 9a |
| | guide_28 | | ACGAAGGGGACTAAAACca | tagattgctgt | CCCAAAAACGAA | | |
| | | | ggtcgagtagattgctgtt | tctaccaa | GGGGACTAAAAC | | |
| | | | ctaccaa | | | | |
| 9a | ssRNA1_ | LwaCas13a | GATTTAGACTACCCCAAAA | gcaggtcga | GATTTAGACTAC | ssRNA1 | 9a |
| | guide_29 | | ACGAAGGGGACTAAAACgc | gtagattgct | CCCAAAAACGAA | | |
| | | | aggtcgagtagattgctgt | gttctacca | GGGGACTAAAAC | | |
| | | | tctacca | | | | |
| 9a | ssRNA1_ | LwaCas13a | GATTTAGACTACCCCAAAA | tgcaggtcg | GATTTAGACTAC | ssRNA1 | 9a |
| | guide_30 | | ACGAAGGGGACTAAAACtg | agtagattgc | CCCAAAAACGAA | | |
| | | | caggtcgagtagattgctg | tgttctacc | GGGGACTAAAAC | | |
| | | | ttctacc | | | | |
| 9a | ssRNA1_ | LwaCas13a | GATTTAGACTACCCCAAAA | ctgcaggtc | GATTTAGACTAC | ssRNA1 | 9a |
| | guide_31 | | ACGAAGGGGACTAAAACct | gagtagattg | CCCAAAAACGAA | | |
| | | | caggtcgagtagattgctg | ctgttctac | GGGGACTAAAAC | | |
| | | | ttctac | | | | |
| 9a | ssRNA1_ | LwaCas13a | GATTTAGACTACCCCAAAA | cctgcaggt | GATTTAGACTAC | ssRNA1 | 9a |
| | guide_32 | | ACGAAGGGGACTAAAACcc | cgagtagatt | CCCAAAAACGAA | | |
| | | | tgcaggtcgagtagattgc | gctgttcta | GGGGACTAAAAC | | |
| | | | tgttcta | | | | |
| 9a | ssRNA1_ | LwaCas13a | GATTTAGACTACCCCAAAA | tgcctgcag | GATTTAGACTAC | ssRNA1 | 9a |
| | guide_33 | | ACGAAGGGGACTAAAACtg | gtcgagtag | CCCAAAAACGAA | | |
| | | | cctgcaggtcgagtagatt | attgctgttc | GGGGACTAAAAC | | |
| | | | gctgttc | | | | |
| 9a | ssRNA1_ | LwaCas13a | GATTTAGACTACCCCAAAA | atgcctgca | GATTTAGACTAC | ssRNA1 | 9a |
| | guide_34 | | ACGAAGGGGACTAAAACat | ggtcgagta | CCCAAAAACGAA | | |
| | | | gcctgcaggtcgagtagat | gattgctgtt | GGGGACTAAAAC | | |
| | | | tgctgtt | | | | |
| 9a | ssRNA1_ | LwaCas13a | GATTTAGACTACCCCAAAA | catgcctgca | GATTTAGACTAC | ssRNA1 | 9a |
| | guide_35 | | ACGAAGGGGACTAAAACca | ggtcgagta | CCCAAAAACGAA | | |
| | | | tgcctgcaggtcgagtaga | gattgctgt | GGGGACTAAAAC | | |
| | | | ttgctgt | | | | |
| 9a | ssRNA1_ | LwaCas13a | GATTTAGACTACCCCAAAA | tgcatgcctg | GATTTAGACTAC | ssRNA1 | 9a |
| | guide_36 | | ACGAAGGGGACTAAAACtg | caggtcgag | CCCAAAAACGAA | | |
| | | | catgcctgcaggtcgagta | tagattgct | GGGGACTAAAAC | | |
| | | | gattgct | | | | |
| 9a | ssRNA1_ | LwaCas13a | GATTTAGACTACCCCAAAA | cttgcatgcc | GATTTAGACTAC | ssRNA1 | 9a |
| | guide_38 | | ACGAAGGGGACTAAAACct | tgcaggtcg | CCCAAAAACGAA | | |
| | | | tgcatgcctgcaggtcgag | agtagattg | GGGGACTAAAAC | | |
| | | | tagattg | | | | |
| 9a | ssRNA1_ | LwaCas13a | GATTTAGACTACCCCAAAA | agcttgcatg | GATTTAGACTAC | ssRNA1 | 9a |
| | guide_40 | | ACGAAGGGGACTAAAACag | cctgcaggt | CCCAAAAACGAA | | |
| | | | cttgcatgcctgcaggtcg | cgagtagat | GGGGACTAAAAC | | |
| | | | agtagat | | | | |
| 9a | ssRNA1_ | LwaCas13a | GATTTAGACTACCCCAAAA | caagcttgca | GATTTAGACTAC | ssRNA1 | 9a |
| | guide_42 | | ACGAAGGGGACTAAAACca | tgcctgcag | CCCAAAAACGAA | | |
| | | | agcttgcatgcctgcaggt | gtcgagtag | GGGGACTAAAAC | | |
| | | | cgagtag | | | | |
| 9a | ssRNA1_ | LwaCas13a | GATTTAGACTACCCCAAAA | ccaagcttgc | GATTTAGACTAC | ssRNA1 | 9a |
| | guide_43 | | ACGAAGGGGACTAAAACcc | atgcctgca | CCCAAAAACGAA | | |
| | | | aagcttgcatgcctgcagg | ggtcgagta | GGGGACTAAAAC | | |
| | | | tcgagta | | | | |
| 9a | ssRNA1_ | LwaCas13a | GATTTAGACTACCCCAAAA | cgccaagctt | GATTTAGACTAC | ssRNA1 | 9a |
| | guide_44 | | ACGAAGGGGACTAAAACcg | gcatgcctg | CCCAAAAACGAA | | |
| | | | ccaagcttgcatgcctgca | caggtcgag | GGGGACTAAAAC | | |
| | | | ggtcgag | | | | |
| 9a | ssRNA1_ | LwaCas13a | GATTTAGACTACCCCAAAA | acgccaagc | GATTTAGACTAC | ssRNA1 | 9a |
| | guide_45 | | ACGAAGGGGACTAAAACac | ttgcatgcct | CCCAAAAACGAA | | |
| | | | gccaagcttgcatgcctgc | gcaggtcga | GGGGACTAAAAC | | |
| | | | aggtcga | | | | |
| 9a | ssRNA1_ | LwaCas13a | GATTTAGACTACCCCAAAA | tacgccaag | GATTTAGACTAC | ssRNA1 | 9a |
| | guide_46 | | ACGAAGGGGACTAAAACta | cttgcatgcc | CCCAAAAACGAA | | |
| | | | cgccaagcttgcatgcctg | tgcaggtcg | GGGGACTAAAAC | | |
| | | | caggtcg | | | | |
| 9a | ssRNA1_ | LwaCas13a | GATTTAGACTACCCCAAAA | ttacgccaag | GATTTAGACTAC | ssRNA1 | 9a |
| | guide_47 | | ACGAAGGGGACTAAAACtt | cttgcatgcc | CCCAAAAACGAA | | |
| | | | acgccaagcttgcatgcct | tgcaggtc | GGGGACTAAAAC | | |
| | | | gcaggtc | | | | |
| 9a | ssRNA1_ | LwaCas13a | GATTTAGACTACCCCAAAA | attacgccaa | GATTTAGACTAC | ssRNA1 | 9a |
| | guide_48 | | ACGAAGGGGACTAAAACat | gcttgcatgc | CCCAAAAACGAA | | |
| | | | tacgccaagcttgcatgcc | ctgcaggt | GGGGACTAAAAC | | |
| | | | tgcaggt | | | | |
| 9a | ssRNA1_ | LwaCas13a | GATTTAGACTACCCCAAAA | gattacgcca | GATTTAGACTAC | ssRNA1 | 9a |
| | guide_49 | | ACGAAGGGGACTAAAACga | agcttgcatg | CCCAAAAACGAA | | |
| | | | ttacgccaagcttgcatgc | cctgcagg | GGGGACTAAAAC | | |
| | | | ctgcagg | | | | |
| 9a | ssRNA1_ | LwaCas13a | GATTTAGACTACCCCAAAA | ccatgattac | GATTTAGACTAC | ssRNA1 | 9a |
| | guide_52 | | ACGAAGGGGACTAAAACcc | gccaagctt | CCCAAAAACGAA | | |
| | | | atgattacgccaagcttgc | gcatgcctg | GGGGACTAAAAC | | |
| | | | atgcctg | | | | |
| 9a | ssRNA1_ | LwaCas13a | GATTTAGACTACCCCAAAA | accatgatta | GATTTAGACTAC | ssRNA1 | 9a |
| | guide_53 | | ACGAAGGGGACTAAAACac | cgccaagctt | CCCAAAAACGAA | | |
| | | | catgattacgccaagcttg | gcatgcct | GGGGACTAAAAC | | |
| | | | catgcct | | | | |
| 9a | ssRNA1_ | LwaCas13a | GATTTAGACTACCCCAAAA | gaccatgatt | GATTTAGACTAC | ssRNA1 | 9a |
| | guide_54 | | ACGAAGGGGACTAAAACga | acgccaagc | CCCAAAAACGAA | | |
| | | | ccatgattacgccaagctt | ttgcatgcc | GGGGACTAAAAC | | |
| | | | gcatgcc | | | | |
| 9a | ssRNA1_ | LwaCas13a | GATTTAGACTACCCCAAAA | atgaccatga | GATTTAGACTAC | ssRNA1 | 9a |
| | guide_55 | | ACGAAGGGGACTAAAACat | ttacgccaag | CCCAAAAACGAA | | |
| | | | gaccatgattacgccaagc | cttgcatg | GGGGACTAAAAC | | |
| | | | ttgcatg | | | | |
| 9a | ssRNA1_ | LwaCas13a | GATTTAGACTACCCCAAAA | tatgaccatg | GATTTAGACTAC | ssRNA1 | 9a |
| | guide_56 | | ACGAAGGGGACTAAAACta | attacgccaa | CCCAAAAACGAA | | |
| | | | tgaccatgattacgccaag | gcttgcat | GGGGACTAAAAC | | |
| | | | cttgcat | | | | |
| 9a | ssRNA1_ | LwaCas13a | GATTTAGACTACCCCAAAA | agctatgacc | GATTTAGACTAC | ssRNA1 | 9a |
| | guide_57 | | ACGAAGGGGACTAAAACag | atgattacgc | CCCAAAAACGAA | | |
| | | | ctatgaccatgattacgcc | caagcttg | GGGGACTAAAAC | | |
| | | | aagcttg | | | | |
| 9a | ssRNA1_ | LwaCas13a | GATTTAGACTACCCCAAAA | cagctatgac | GATTTAGACTAC | ssRNA1 | 9a |
| | guide_58 | | ACGAAGGGGACTAAAACca | catgattacg | CCCAAAAACGAA | | |
| | | | gctatgaccatgattacgc | ccaagctt | GGGGACTAAAAC | | |
| | | | caagctt | | | | |
| 9a | ssRNA1_ | LwaCas13a | GATTTAGACTACCCCAAAA | acagctatga | GATTTAGACTAC | ssRNA1 | 9a |
| | guide_59 | | ACGAAGGGGACTAAAACac | ccatgattac | CCCAAAAACGAA | | |
| | | | agctatgaccatgattacg | gccaagct | GGGGACTAAAAC | | |
| | | | ccaagct | | | | |
| 9a | ssRNA1_ | LwaCas13a | GATTTAGACTACCCCAAAA | aacagctatg | GATTTAGACTAC | ssRNA1 | 9a |
| | guide_60 | | ACGAAGGGGACTAAAACaa | accatgatta | CCCAAAAACGAA | | |
| | | | cagctatgaccatgattac | cgccaagc | GGGGACTAAAAC | | |
| | | | gccaagc | | | | |
| 9a | ssRNA1_ | LwaCas13a | GATTTAGACTACCCCAAAA | aacacagga | GATTTAGACTAC | ssRNA1 | 9a |
| | guide_64 | | ACGAAGGGGACTAAAACaa | aacagctatg | CCCAAAAACGAA | | |
| | | | cacaggaaacagctatgac | accatgatt | GGGGACTAAAAC | | |
| | | | catgatt | | | | |
| 9a | ssRNA1_ | LwaCas13a | GATTTAGACTACCCCAAAA | taaacacag | GATTTAGACTAC | ssRNA1 | 9a |
| | guide_65 | | ACGAAGGGGACTAAAACta | gaaacagct | CCCAAAAACGAA | | |
| | | | aacacaggaaacagctatg | atgaccatga | GGGGACTAAAAC | | |
| | | | accatga | | | | |
| 9a | ssRNA1_ | LwaCas13a | GATTTAGACTACCCCAAAA | ataaacaca | GATTTAGACTAC | ssRNA1 | 9a |
| | guide_66 | | ACGAAGGGGACTAAAACat | ggaaacagc | CCCAAAAACGAA | | |
| | | | aaacacaggaaacagctat | tatgaccatg | GGGGACTAAAAC | | |
| | | | gaccatg | | | | |
| 9a | ssRNA1_ | LwaCas13a | GATTTAGACTACCCCAAAA | gataaacac | GATTTAGACTAC | ssRNA1 | 9a |
| | guide_67 | | ACGAAGGGGACTAAAACga | aggaaacag | CCCAAAAACGAA | | |
| | | | taaacacaggaaacagcta | ctatgaccat | GGGGACTAAAAC | | |
| | | | tgaccat | | | | |
| 9a | ssRNA1_ | LwaCas13a | GATTTAGACTACCCCAAAA | ggataaaca | GATTTAGACTAC | ssRNA1 | 9a |
| | guide_68 | | ACGAAGGGGACTAAAACgg | caggaaaca | CCCAAAAACGAA | | |
| | | | ataaacacaggaaacagct | gctatgacca | GGGGACTAAAAC | | |
| | | | atgacca | | | | |
| 9a | ssRNA1_ | LwaCas13a | GATTTAGACTACCCCAAAA | cggataaac | GATTTAGACTAC | ssRNA1 | 9a |
| | guide_69 | | ACGAAGGGGACTAAAACcg | acaggaaac | CCCAAAAACGAA | | |
| | | | gataaacacaggaaacagc | agctatgacc | GGGGACTAAAAC | | |
| | | | tatgacc | | | | |
| 9a | ssRNA1_ | LwaCas13a | GATTTAGACTACCCCAAAA | gcggataaa | GATTTAGACTAC | ssRNA1 | 9a |
| | guide_70 | | ACGAAGGGGACTAAAACgc | cacaggaaa | CCCAAAAACGAA | | |
| | | | ggataaacacaggaaacag | cagctatgac | GGGGACTAAAAC | | |
| | | | ctatgac | | | | |
| 9a | ssRNA1_ | LwaCas13a | GATTTAGACTACCCCAAAA | agcggataa | GATTTAGACTAC | ssRNA1 | 9a |
| | guide_71 | | ACGAAGGGGACTAAAACag | acacaggaa | CCCAAAAACGAA | | |
| | | | cggataaacacaggaaaca | acagctatga | GGGGACTAAAAC | | |
| | | | gctatga | | | | |
| 9a | ssRNA1_ | LwaCas13a | GATTTAGACTACCCCAAAA | tgagcggat | GATTTAGACTAC | ssRNA1 | 9a |
| | guide_72 | | ACGAAGGGGACTAAAACtg | aaacacagg | CCCAAAAACGAA | | |
| | | | agcggataaacacaggaaa | aaacagctat | GGGGACTAAAAC | | |
| | | | cagctat | | | | |
| 9a | ssRNA1_ | LwaCas13a | GATTTAGACTACCCCAAAA | tgtgagcgg | GATTTAGACTAC | ssRNA1 | 9a |
| | guide_73 | | ACGAAGGGGACTAAAACtg | ataaacaca | CCCAAAAACGAA | | |
| | | | tgagcggataaacacagga | ggaaacagc | GGGGACTAAAAC | | |
| | | | aacagct | t | | | |
| 9a | ssRNA1_ | LwaCas13a | GATTTAGACTACCCCAAAA | ttgtgagcgg | GATTTAGACTAC | ssRNA1 | 9a |
| | guide_74 | | ACGAAGGGGACTAAAACtt | ataaacaca | CCCAAAAACGAA | | |
| | | | gtgagcggataaacacagg | ggaaacagc | GGGGACTAAAAC | | |
| | | | aaacagc | | | | |
| 9a | ssRNA1_ | LwaCas13a | GATTTAGACTACCCCAAAA | ggaattgtga | GATTTAGACTAC | ssRNA1 | 9a |
| | guide_76 | | ACGAAGGGGACTAAAACgg | gcggataaa | CCCAAAAACGAA | | |
| | | | aattgtgagcggataaaca | cacaggaaa | GGGGACTAAAAC | | |
| | | | caggaaa | | | | |
| 9a | ssRNA1_ | LwaCas13a | GATTTAGACTACCCCAAAA | tggaattgtg | GATTTAGACTAC | ssRNA1 | 9a |
| | guide_77 | | ACGAAGGGGACTAAAACtg | agcggataa | CCCAAAAACGAA | | |
| | | | gaattgtgagcggataaac | acacaggaa | GGGGACTAAAAC | | |
| | | | acaggaa | | | | |
| 9a | ssRNA1_ | LwaCas13a | GATTTAGACTACCCCAAAA | gtggaattgt | GATTTAGACTAC | ssRNA1 | 9a |
| | guide_78 | | ACGAAGGGGACTAAAACgt | gagcggata | CCCAAAAACGAA | | |
| | | | ggaattgtgagcggataaa | aacacagga | GGGGACTAAAAC | | |
| | | | cacagga | | | | |
| 9a | ssRNA1_ | LwaCas13a | GATTTAGACTACCCCAAAA | tgtggaattg | GATTTAGACTAC | ssRNA1 | 9a |
| | guide_79 | | ACGAAGGGGACTAAAACtg | tgagcggat | CCCAAAAACGAA | | |
| | | | tggaattgtgagcggataa | aaacacagg | GGGGACTAAAAC | | |
| | | | acacagg | | | | |
| 9a | ssRNA1_ | LwaCas13a | GATTTAGACTACCCCAAAA | tgtgtggaat | GATTTAGACTAC | ssRNA1 | 9a |
| | guide_80 | | ACGAAGGGGACTAAAACtg | tgtgagcgg | CCCAAAAACGAA | | |
| | | | tgtggaattgtgagcggat | ataaacaca | GGGGACTAAAAC | | |
| | | | aaacaca | | | | |
| 9a | ssRNA1_ | LwaCas13a | GATTTAGACTACCCCAAAA | ttgtgtggaa | GATTTAGACTAC | ssRNA1 | 9a |
| | guide_81 | | ACGAAGGGGACTAAAACtt | ttgtgagcgg | CCCAAAAACGAA | | |
| | | | gtgtggaattgtgagcgga | ataaacac | GGGGACTAAAAC | | |
| | | | taaacac | | | | |
| 9a | ssRNA1_ | LwaCas13a | GATTTAGACTACCCCAAAA | gttgtgtgga | GATTTAGACTAC | ssRNA1 | 9a |
| | guide_82 | | ACGAAGGGGACTAAAACgt | attgtgagcg | CCCAAAAACGAA | | |
| | | | tgtgtggaattgtgagcgg | gataaaca | GGGGACTAAAAC | | |
| | | | ataaaca | | | | |
| 9a | ssRNA1_ | LwaCas13a | GATTTAGACTACCCCAAAA | atgttgtgtg | GATTTAGACTAC | ssRNA1 | 9a |
| | guide_83 | | ACGAAGGGGACTAAAACat | gaattgtgag | CCCAAAAACGAA | | |
| | | | gttgtgtggaattgtgagc | cggataaa | GGGGACTAAAAC | | |
| | | | ggataaa | | | | |
| 9a | ssRNA1_ | LwaCas13a | GATTTAGACTACCCCAAAA | tatgttgtgtg | GATTTAGACTAC | ssRNA1 | 9a |
| | guide_84 | | ACGAAGGGGACTAAAACta | gaattgtgag | CCCAAAAACGAA | | |
| | | | tgttgtgtggaattgtgag | cggataa | GGGGACTAAAAC | | |
| | | | cggataa | | | | |
| 9a | ssRNA1_ | LwaCas13a | GATTTAGACTACCCCAAAA | tcgtatgttgt | GATTTAGACTAC | ssRNA1 | 9a |
| | guide_86 | | ACGAAGGGGACTAAAACtc | gtggaattgt | CCCAAAAACGAA | | |
| | | | gtatgttgtgtggaattgt | gagcgga | GGGGACTAAAAC | | |
| | | | gagcgga | | | | |
| 9a | ssRNA1_ | LwaCas13a | GATTTAGACTACCCCAAAA | ggctcgtatg | GATTTAGACTAC | ssRNA1 | 9a |
| | guide_88 | | ACGAAGGGGACTAAAACgg | ttgtgtggaa | CCCAAAAACGAA | | |
| | | | ctcgtatgttgtgtggaat | ttgtgagc | GGGGACTAAAAC | | |
| | | | tgtgagc | | | | |
| 9a | ssRNA1_ | LwaCas13a | GATTTAGACTACCCCAAAA | cggctcgtat | GATTTAGACTAC | ssRNA1 | 9a |
| | guide_89 | | ACGAAGGGGACTAAAACcg | gttgtgtgga | CCCAAAAACGAA | | |
| | | | gctcgtatgttgtgtggaa | attgtgag | GGGGACTAAAAC | | |
| | | | ttgtgag | | | | |
| 9a | ssRNA1_ | LwaCas13a | GATTTAGACTACCCCAAAA | ccggctcgt | GATTTAGACTAC | ssRNA1 | 9a |
| | guide_90 | | ACGAAGGGGACTAAAACcc | atgttgtgtg | CCCAAAAACGAA | | |
| | | | ggctcgtatgttgtgtgga | gaattgtga | GGGGACTAAAAC | | |
| | | | attgtga | | | | |
| 9a | ssRNA1_ | LwaCas13a | GATTTAGACTACCCCAAAA | ttccggctcg | GATTTAGACTAC | ssRNA1 | 9a |
| | guide_91 | | ACGAAGGGGACTAAAACtt | tatgttgtgtg | CCCAAAAACGAA | | |
| | | | ccggctcgtatgttgtgtg | gaattgt | GGGGACTAAAAC | | |
| | | | gaattgt | | | | |
| 9a | ssRNA1_ | LwaCas13a | GATTTAGACTACCCCAAAA | cttccggctc | GATTTAGACTAC | ssRNA1 | 9a |
| | guide_92 | | ACGAAGGGGACTAAAACct | gtatgttgtgt | CCCAAAAACGAA | | |
| | | | tccggctcgtatgttgtgt | ggaattg | GGGGACTAAAAC | | |
| | | | ggaattg | | | | |
| 9a | ssRNA1_ | LwaCas13a | GATTTAGACTACCCCAAAA | gcttccggct | GATTTAGACTAC | ssRNA1 | 9a |
| | guide_93 | | ACGAAGGGGACTAAAACgc | cgtatgttgt | CCCAAAAACGAA | | |
| | | | ttccggctcgtatgttgtg | gtggaatt | GGGGACTAAAAC | | |
| | | | tggaatt | | | | |
| 9a | ssRNA1_ | LwaCas13a | GATTTAGACTACCCCAAAA | atgcttccgg | GATTTAGACTAC | ssRNA1 | 9a |
| | guide_94 | | ACGAAGGGGACTAAAACat | ctcgtatgttg | CCCAAAAACGAA | | |
| | | | gcttccggctcgtatgttg | tgtggaa | GGGGACTAAAAC | | |
| | | | tgtggaa | | | | |
| 9a | ssRNA1_ | LwaCas13a | GATTTAGACTACCCCAAAA | tatgcttccg | GATTTAGACTAC | ssRNA1 | 9a |
| | guide_95 | | ACGAAGGGGACTAAAACta | gctcgtatgtt | CCCAAAAACGAA | | |
| | | | tgcttccggctcgtatgtt | gtgtgga | GGGGACTAAAAC | | |
| | | | gtgtgga | | | | |
| 9a | ssRNA1_ | LwaCas13a | GATTTAGACTACCCCAAAA | ttatgcttccg | GATTTAGACTAC | ssRNA1 | 9a |
| | guide_96 | | ACGAAGGGGACTAAAACtt | gctcgtatgtt | CCCAAAAACGAA | | |
| | | | atgcttccggctcgtatgt | gtgtgg | GGGGACTAAAAC | | |
| | | | tgtgtgg | | | | |
| 9a | therm_00 | LwaCas13a | GATTTAGACTACCCCAAAA | taatttaaca | GATTTAGACTAC | thermo- | 9a |
| | | | ACGAAGGGGACTAAAACta | gtatcaccat | CCCAAAAACGAA | nuclease | |
| | | | atttaacagtatcaccatc | caatcgct | GGGGACTAAAAC | | |
| | | | aatcgct | | | | |
| 9a | therm_01 | LwaCas13a | GATTTAGACTACCCCAAAA | ttaatttaaca | GATTTAGACTAC | thermo- | 9a |
| | | | ACGAAGGGGACTAAAACtt | gtatcaccat | CCCAAAAACGAA | nuclease | |
| | | | aatttaacagtatcaccat | caatcgc | GGGGACTAAAAC | | |
| | | | caatcgc | | | | |
| 9a | therm_02 | LwaCas13a | GATTTAGACTACCCCAAAA | attaatttaac | GATTTAGACTAC | thermo- | 9a |
| | | | ACGAAGGGGACTAAAACat | agtatcacca | CCCAAAAACGAA | nuclease | |
| | | | taatttaacagtatcacca | tcaatcg | GGGGACTAAAAC | | |
| | | | tcaatcg | | | | |
| 9a | therm_03 | LwaCas13a | GATTTAGACTACCCCAAAA | cattaatttaa | GATTTAGACTAC | thermo- | 9a |
| | | | ACGAAGGGGACTAAAACca | cagtatcacc | CCCAAAAACGAA | nuclease | |
| | | | ttaatttaacagtatcacc | atcaatc | GGGGACTAAAAC | | |
| | | | atcaatc | | | | |
| 9a | therm_04 | LwaCas13a | GATTTAGACTACCCCAAAA | acattaattta | GATTTAGACTAC | thermo- | 9a |
| | | | ACGAAGGGGACTAAAACac | acagtatcac | CCCAAAAACGAA | nuclease | |
| | | | attaatttaacagtatcac | catcaat | GGGGACTAAAAC | | |
| | | | catcaat | | | | |
| 9a | therm_05 | LwaCas13a | GATTTAGACTACCCCAAAA | tacattaattt | GATTTAGACTAC | thermo- | 9a |
| | | | ACGAAGGGGACTAAAACta | aacagtatca | CCCAAAAACGAA | nuclease | |
| | | | cattaatttaacagtatca | ccatcaa | GGGGACTAAAAC | | |
| | | | ccatcaa | | | | |
| 9a | therm_06 | LwaCas13a | GATTTAGACTACCCCAAAA | gtacattaatt | GATTTAGACTAC | thermo- | 9a |
| | | | ACGAAGGGGACTAAAACgt | taacagtatc | CCCAAAAACGAA | nuclease | |
| | | | acattaatttaacagtatc | accatca | GGGGACTAAAAC | | |
| | | | accatca | | | | |
| 9a | therm_07 | LwaCas13a | GATTTAGACTACCCCAAAA | tgtacattaat | GATTTAGACTAC | thermo- | 9a |
| | | | ACGAAGGGGACTAAAACtg | ttaacagtat | CCCAAAAACGAA | nuclease | |
| | | | tacattaatttaacagtat | caccatc | GGGGACTAAAAC | | |
| | | | caccatc | | | | |
| 9a | therm_08 | LwaCas13a | GATTTAGACTACCCCAAAA | ttgtacattaa | GATTTAGACTAC | thermo- | 9a |
| | | | ACGAAGGGGACTAAAACtt | tttaacagtat | CCCAAAAACGAA | nuclease | |
| | | | gtacattaatttaacagta | caccat | GGGGACTAAAAC | | |
| | | | tcaccat | | | | |
| 9a | therm_09 | LwaCas13a | GATTTAGACTACCCCAAAA | tttgtacatta | GATTTAGACTAC | thermo- | 9a |
| | | | ACGAAGGGGACTAAAACtt | atttaacagt | CCCAAAAACGAA | nuclease | |
| | | | tgtacattaatttaacagt | atcacca | GGGGACTAAAAC | | |
| | | | atcacca | | | | |
| 9a | therm_10 | LwaCas13a | GATTTAGACTACCCCAAAA | ctttgtacatt | GATTTAGACTAC | thermo- | 9a |
| | | | ACGAAGGGGACTAAAACct | aatttaacag | CCCAAAAACGAA | nuclease | |
| | | | ttgtacattaatttaacag | tatcacc | GGGGACTAAAAC | | |
| | | | tatcacc | | | | |
| 9a | therm_11 | LwaCas13a | GATTTAGACTACCCCAAAA | cctttgtacat | GATTTAGACTAC | thermo- | 9a |
| | | | ACGAAGGGGACTAAAACcc | taatttaaca | CCCAAAAACGAA | nuclease | |
| | | | tttgtacattaatttaaca | gtatcac | GGGGACTAAAAC | | |
| | | | gtatcac | | | | |
| 9a | therm_12 | LwaCas13a | GATTTAGACTACCCCAAAA | acctttgtac | GATTTAGACTAC | thermo- | 9a |
| | | | ACGAAGGGGACTAAAACac | attaatttaac | CCCAAAAACGAA | nuclease | |
| | | | ctttgtacattaatttaac | agtatca | GGGGACTAAAAC | | |
| | | | agtatca | | | | |
| 9a | therm_13 | LwaCas13a | GATTTAGACTACCCCAAAA | gacctttgta | GATTTAGACTAC | thermo- | 9a |
| | | | ACGAAGGGGACTAAAACga | cattaatttaa | CCCAAAAACGAA | nuclease | |
| | | | cctttgtacattaatttaa | cagtatc | GGGGACTAAAAC | | |
| | | | cagtatc | | | | |
| 9a | therm_14 | LwaCas13a | GATTTAGACTACCCCAAAA | tgacctttgta | GATTTAGACTAC | thermo- | 9a |
| | | | ACGAAGGGGACTAAAACtg | cattaatttaa | CCCAAAAACGAA | nuclease | |
| | | | acctttgtacattaattta | cagtat | GGGGACTAAAAC | | |
| | | | acagtat | | | | |
| 9a | therm_15 | LwaCas13a | GATTTAGACTACCCCAAAA | ttgacctttgt | GATTTAGACTAC | thermo- | 9a |
| | | | ACGAAGGGGACTAAAACtt | acattaattta | CCCAAAAACGAA | nuclease | |
| | | | gacctttgtacattaattt | acagta | GGGGACTAAAAC | | |
| | | | aacagta | | | | |
| 9a | therm_16 | LwaCas13a | GATTTAGACTACCCCAAAA | gttgacctttg | GATTTAGACTAC | thermo- | 9a |
| | | | ACGAAGGGGACTAAAACgt | tacattaattt | CCCAAAAACGAA | nuclease | |
| | | | tgacctttgtacattaatt | aacagt | GGGGACTAAAAC | | |
| | | | taacagt | | | | |
| 9a | therm_17 | LwaCas13a | GATTTAGACTACCCCAAAA | ggttgaccttt | GATTTAGACTAC | thermo- | 9a |
| | | | ACGAAGGGGACTAAAACgg | gtacattaatt | CCCAAAAACGAA | nuclease | |
| | | | ttgacctttgtacattaat | taacag | GGGGACTAAAAC | | |
| | | | ttaacag | | | | |
| 9a | therm_18 | LwaCas13a | GATTTAGACTACCCCAAAA | tggttgacctt | GATTTAGACTAC | thermo- | 9a |
| | | | ACGAAGGGGACTAAAACtg | tgtacattaat | CCCAAAAACGAA | nuclease | |
| | | | gttgacctttgtacattaa | ttaaca | GGGGACTAAAAC | | |
| | | | tttaaca | | | | |
| 9a | therm_19 | LwaCas13a | GATTTAGACTACCCCAAAA | ttggttgacct | GATTTAGACTAC | thermo- | 9a |
| | | | ACGAAGGGGACTAAAACtt | ttgtacattaa | CCCAAAAACGAA | nuclease | |
| | | | ggttgacctttgtacatta | tttaac | GGGGACTAAAAC | | |
| | | | atttaac | | | | |
| 9a | therm_20 | LwaCas13a | GATTTAGACTACCCCAAAA | cattggttga | GATTTAGACTAC | thermo- | 9a |
| | | | ACGAAGGGGACTAAAACca | cctttgtacat | CCCAAAAACGAA | nuclease | |
| | | | ttggttgacctttgtacat | taattta | GGGGACTAAAAC | | |
| | | | taattta | | | | |
| 9a | therm_21 | LwaCas13a | GATTTAGACTACCCCAAAA | gtcattggtt | GATTTAGACTAC | thermo- | 9a |
| | | | ACGAAGGGGACTAAAACgt | gacctttgta | CCCAAAAACGAA | nuclease | |
| | | | cattggttgacctttgtac | cattaatt | GGGGACTAAAAC | | |
| | | | attaatt | | | | |
| 9a | therm_22 | LwaCas13a | GATTTAGACTACCCCAAAA | atgtcattggt | GATTTAGACTAC | thermo- | 9a |
| | | | ACGAAGGGGACTAAAACat | tgacctttgta | CCCAAAAACGAA | nuclease | |
| | | | gtcattggttgacctttgt | cattaa | GGGGACTAAAAC | | |
| | | | acattaa | | | | |
| 9a | therm_23 | LwaCas13a | GATTTAGACTACCCCAAAA | gaatgtcatt | GATTTAGACTAC | thermo- | 9a |
| | | | ACGAAGGGGACTAAAACga | ggttgaccttt | CCCAAAAACGAA | nuclease | |
| | | | atgtcattggttgaccttt | gtacatt | GGGGACTAAAAC | | |
| | | | gtacatt | | | | |
| 9a | therm_24 | LwaCas13a | GATTTAGACTACCCCAAAA | ctgaatgtca | GATTTAGACTAC | thermo- | 9a |
| | | | ACGAAGGGGACTAAAACct | ttggttgacct | CCCAAAAACGAA | nuclease | |
| | | | gaatgtcattggttgacct | ttgtaca | GGGGACTAAAAC | | |
| | | | ttgtaca | | | | |
| 9a | therm_25 | LwaCas13a | GATTTAGACTACCCCAAAA | gtctgaatgt | GATTTAGACTAC | thermo- | 9a |
| | | | ACGAAGGGGACTAAAACgt | cattggttga | CCCAAAAACGAA | nuclease | |
| | | | ctgaatgtcattggttgac | cctttgta | GGGGACTAAAAC | | |
| | | | ctttgta | | | | |
| 9a | therm_26 | LwaCas13a | GATTTAGACTACCCCAAAA | tagtctgaat | GATTTAGACTAC | thermo- | 9a |
| | | | ACGAAGGGGACTAAAACta | gtcattggtt | CCCAAAAACGAA | nuclease | |
| | | | gtctgaatgtcattggttg | gacctttg | GGGGACTAAAAC | | |
| | | | acctttg | | | | |
| 9a | therm_27 | LwaCas13a | GATTTAGACTACCCCAAAA | aatagtctga | GATTTAGACTAC | thermo- | 9a |
| | | | ACGAAGGGGACTAAAACaa | atgtcattggt | CCCAAAAACGAA | nuclease | |
| | | | tagtctgaatgtcattggt | tgacctt | GGGGACTAAAAC | | |
| | | | tgacctt | | | | |
| 9a | therm_28 | LwaCas13a | GATTTAGACTACCCCAAAA | ataatagtct | GATTTAGACTAC | thermo- | 9a |
| | | | ACGAAGGGGACTAAAACat | gaatgtcatt | CCCAAAAACGAA | nuclease | |
| | | | aatagtctgaatgtcattg | ggttgacc | GGGGACTAAAAC | | |
| | | | gttgacc | | | | |
| 9a | therm_29 | LwaCas13a | GATTTAGACTACCCCAAAA | caataatagt | GATTTAGACTAC | thermo- | 9a |
| | | | ACGAAGGGGACTAAAACca | ctgaatgtca | CCCAAAAACGAA | nuclease | |
| | | | ataatagtctgaatgtcat | ttggttga | GGGGACTAAAAC | | |
| | | | tggttga | | | | |
| 9a | therm_30 | LwaCas13a | GATTTAGACTACCCCAAAA | accaataata | GATTTAGACTAC | thermo- | 9a |
| | | | ACGAAGGGGACTAAAACac | gtctgaatgt | CCCAAAAACGAA | nuclease | |
| | | | caataatagtctgaatgtc | cattggtt | GGGGACTAAAAC | | |
| | | | attggtt | | | | |
| 9a | therm_31 | LwaCas13a | GATTTAGACTACCCCAAAA | caaccaata | GATTTAGACTAC | thermo- | 9a |
| | | | ACGAAGGGGACTAAAACca | atagtctgaa | CCCAAAAACGAA | nuclease | |
| | | | accaataatagtctgaatg | tgtcattgg | GGGGACTAAAAC | | |
| | | | tcattgg | | | | |
| 9a | therm_32 | LwaCas13a | GATTTAGACTACCCCAAAA | atcaaccaat | GATTTAGACTAC | thermo- | 9a |
| | | | ACGAAGGGGACTAAAACat | aatagtctga | CCCAAAAACGAA | nuclease | |
| | | | caaccaataatagtctgaa | atgtcatt | GGGGACTAAAAC | | |
| | | | tgtcatt | | | | |
| 9a | therm_33 | LwaCas13a | GATTTAGACTACCCCAAAA | gtatcaacca | GATTTAGACTAC | thermo- | 9a |
| | | | ACGAAGGGGACTAAAACgt | ataatagtct | CCCAAAAACGAA | nuclease | |
| | | | atcaaccaataatagtctg | gaatgtca | GGGGACTAAAAC | | |
| | | | aatgtca | | | | |
| 9a | therm_34 | LwaCas13a | GATTTAGACTACCCCAAAA | gtgtatcaac | GATTTAGACTAC | thermo- | 9a |
| | | | ACGAAGGGGACTAAAACgt | caataatagt | CCCAAAAACGAA | nuclease | |
| | | | gtatcaaccaataatagtc | ctgaatgt | GGGGACTAAAAC | | |
| | | | tgaatgt | | | | |
| 9a | therm_35 | LwaCas13a | GATTTAGACTACCCCAAAA | aggtgtatca | GATTTAGACTAC | thermo- | 9a |
| | | | ACGAAGGGGACTAAAACag | accaataata | CCCAAAAACGAA | nuclease | |
| | | | gtgtatcaaccaataatag | gtctgaat | GGGGACTAAAAC | | |
| | | | tctgaat | | | | |
| 9a | therm_36 | LwaCas13a | GATTTAGACTACCCCAAAA | tcaggtgtat | GATTTAGACTAC | thermo- | 9a |
| | | | ACGAAGGGGACTAAAACtc | caaccaata | CCCAAAAACGAA | nuclease | |
| | | | aggtgtatcaaccaataat | atagtctga | GGGGACTAAAAC | | |
| | | | agtctga | | | | |
| 9a | therm_37 | LwaCas13a | GATTTAGACTACCCCAAAA | tttcaggtgta | GATTTAGACTAC | thermo- | 9a |
| | | | ACGAAGGGGACTAAAACtt | tcaaccaata | CCCAAAAACGAA | nuclease | |
| | | | tcaggtgtatcaaccaata | atagtct | GGGGACTAAAAC | | |
| | | | atagtct | | | | |
| 9a | therm_38 | LwaCas13a | GATTTAGACTACCCCAAAA | tgtttcaggt | GATTTAGACTAC | thermo- | 9a |
| | | | ACGAAGGGGACTAAAACtg | gtatcaacca | CCCAAAAACGAA | nuclease | |
| | | | tttcaggtgtatcaaccaa | ataatagt | GGGGACTAAAAC | | |
| | | | taatagt | | | | |
| 9a | therm_39 | LwaCas13a | GATTTAGACTACCCCAAAA | tttgtttcagg | GATTTAGACTAC | thermo- | 9a |
| | | | ACGAAGGGGACTAAAACtt | tgtatcaacc | CCCAAAAACGAA | nuclease | |
| | | | tgtttcaggtgtatcaacc | aataata | GGGGACTAAAAC | | |
| | | | aataata | | | | |
| 9a | therm_40 | LwaCas13a | GATTTAGACTACCCCAAAA | gctttgtttca | GATTTAGACTAC | thermo- | 9a |
| | | | ACGAAGGGGACTAAAACgc | ggtgtatcaa | CCCAAAAACGAA | nuclease | |
| | | | tttgtttcaggtgtatcaa | ccaataa | GGGGACTAAAAC | | |
| | | | ccaataa | | | | |
| 9a | therm_41 | LwaCas13a | GATTTAGACTACCCCAAAA | atgctttgttt | GATTTAGACTAC | thermo- | 9a |
| | | | ACGAAGGGGACTAAAACat | caggtgtatc | CCCAAAAACGAA | nuclease | |
| | | | gctttgtttcaggtgtatc | aaccaat | GGGGACTAAAAC | | |
| | | | aaccaat | | | | |
| 9a | therm_42 | LwaCas13a | GATTTAGACTACCCCAAAA | ggatgctttg | GATTTAGACTAC | thermo- | 9a |
| | | | ACGAAGGGGACTAAAACgg | tttcaggtgta | CCCAAAAACGAA | nuclease | |
| | | | atgctttgtttcaggtgta | tcaacca | GGGGACTAAAAC | | |
| | | | tcaacca | | | | |
| 9a | therm_43 | LwaCas13a | GATTTAGACTACCCCAAAA | taggatgcttt | GATTTAGACTAC | thermo- | 9a |
| | | | ACGAAGGGGACTAAAACta | gtttcaggtg | CCCAAAAACGAA | nuclease | |
| | | | ggatgctttgtttcaggtg | tatcaac | GGGGACTAAAAC | | |
| | | | tatcaac | | | | |
| 9a | therm_44 | LwaCas13a | GATTTAGACTACCCCAAAA | GATTTAGACTAC | tttaggatgct | thermo- | 9a |
| | | | ACGAAGGGGACTAAAACtt | ttgtttcaggt | CCCAAAAACGAA | nuclease | |
| | | | taggatgctttgtttcagg | gtatca | GGGGACTAAAAC | | |
| | | | tgtatca | | | | |
| 9a | therm_45 | LwaCas13a | GATTTAGACTACCCCAAAA | tttttaggatg | GATTTAGACTAC | thermo- | 9a |
| | | | ACGAAGGGGACTAAAACtt | ctttgtttcag | CCCAAAAACGAA | nuclease | |
| | | | tttaggatgctttgtttca | gtgtat | GGGGACTAAAAC | | |
| | | | ggtgtat | | | | |
| 9a | therm_46 | LwaCas13a | GATTTAGACTACCCCAAAA | cttttttagga | GATTTAGACTAC | thermo- | 9a |
| | | | ACGAAGGGGACTAAAACct | tgctttgtttc | CCCAAAAACGAA | nuclease | |
| | | | tttttaggatgctttgttt | aggtgt | GGGGACTAAAAC | | |
| | | | caggtgt | | | | |
| 9a | therm_47 | LwaCas13a | GATTTAGACTACCCCAAAA | accttttttag | GATTTAGACTAC | thermo- | 9a |
| | | | ACGAAGGGGACTAAAACac | gatgctttgtt | CCCAAAAACGAA | nuclease | |
| | | | cttttttaggatgctttgt | tcaggt | GGGGACTAAAAC | | |
| | | | ttcaggt | | | | |
| 9a | therm_48 | LwaCas13a | GATTTAGACTACCCCAAAA | acacctttttt | GATTTAGACTAC | thermo- | 9a |
| | | | ACGAAGGGGACTAAAACac | aggatgcttt | CCCAAAAACGAA | nuclease | |
| | | | accttttttaggatgcttt | gtttcag | GGGGACTAAAAC | | |
| | | | gtttcag | | | | |
| 9a | therm_49 | LwaCas13a | GATTTAGACTACCCCAAAA | ctacacctttt | GATTTAGACTAC | thermo- | 9a |
| | | | ACGAAGGGGACTAAAACct | ttaggatgctt | CCCAAAAACGAA | nuclease | |
| | | | acaccttttttaggatgct | tgtttc | GGGGACTAAAAC | | |
| | | | ttgtttc | | | | |
| 9a | therm_50 | LwaCas13a | GATTTAGACTACCCCAAAA | ctctacacctt | GATTTAGACTAC | thermo- | 9a |
| | | | ACGAAGGGGACTAAAACct | ttttaggatgc | CCCAAAAACGAA | nuclease | |
| | | | ctacaccttttttaggatg | tttgtt | GGGGACTAAAAC | | |
| | | | ctttgtt | | | | |
| 9a | therm_51 | LwaCas13a | GATTTAGACTACCCCAAAA | ttctctacacc | GATTTAGACTAC | thermo- | 9a |
| | | | ACGAAGGGGACTAAAACtt | ttttttaggat | CCCAAAAACGAA | nuclease | |
| | | | ctctacaccttttttagga | gctttg | GGGGACTAAAAC | | |
| | | | tgctttg | | | | |
| 9a | therm_52 | LwaCas13a | GATTTAGACTACCCCAAAA | atttctctaca | GATTTAGACTAC | thermo- | 9a |
| | | | ACGAAGGGGACTAAAACat | ccttttttagg | CCCAAAAACGAA | nuclease | |
| | | | ttctctacaccttttttag | atgctt | GGGGACTAAAAC | | |
| | | | gatgctt | | | | |
| 9a | therm_53 | LwaCas13a | GATTTAGACTACCCCAAAA | atatttctcta | GATTTAGACTAC | thermo- | 9a |
| | | | ACGAAGGGGACTAAAACat | cacctttttta | CCCAAAAACGAA | nuclease | |
| | | | atttctctacacctttttt | ggatgc | GGGGACTAAAAC | | |
| | | | aggatgc | | | | |
| 9a | therm_54 | LwaCas13a | GATTTAGACTACCCCAAAA | ccatatttctc | GATTTAGACTAC | thermo- | 9a |
| | | | ACGAAGGGGACTAAAACcc | tacacctttttt | CCCAAAAACGAA | nuclease | |
| | | | atatttctctacacctttt | aggat | GGGGACTAAAAC | | |
| | | | ttaggat | | | | |
| 9a | therm_55 | LwaCas13a | GATTTAGACTACCCCAAAA | gaccatattt | GATTTAGACTAC | thermo- | 9a |
| | | | ACGAAGGGGACTAAAACga | ctctacacctt | CCCAAAAACGAA | nuclease | |
| | | | ccatatttctctacacctt | ttttagg | GGGGACTAAAAC | | |
| | | | ttttagg | | | | |
| 9a | therm_56 | LwaCas13a | GATTTAGACTACCCCAAAA | aggaccatat | GATTTAGACTAC | thermo- | 9a |
| | | | ACGAAGGGGACTAAAACag | ttctctacacc | CCCAAAAACGAA | nuclease | |
| | | | gaccatatttctctacacc | tttttta | GGGGACTAAAAC | | |
| | | | tttttta | | | | |
| 9a | therm_57 | LwaCas13a | GATTTAGACTACCCCAAAA | tcaggaccat | GATTTAGACTAC | thermo- | 9a |
| | | | ACGAAGGGGACTAAAACtc | atttctctaca | CCCAAAAACGAA | nuclease | |
| | | | aggaccatatttctctaca | ccttttt | GGGGACTAAAAC | | |
| | | | ccttttt | | | | |
| 9a | therm_58 | LwaCas13a | GATTTAGACTACCCCAAAA | cttcaggacc | GATTTAGACTAC | thermo- | 9a |
| | | | ACGAAGGGGACTAAAACct | atatttctcta | CCCAAAAACGAA | nuclease | |
| | | | tcaggaccatatttctcta | caccttt | GGGGACTAAAAC | | |
| | | | caccttt | | | | |
| 9a | therm_59 | LwaCas13a | GATTTAGACTACCCCAAAA | tgcttcagga | GATTTAGACTAC | thermo- | 9a |
| | | | ACGAAGGGGACTAAAACtg | ccatatttctc | CCCAAAAACGAA | nuclease | |
| | | | cttcaggaccatatttctc | tacacct | GGGGACTAAAAC | | |
| | | | tacacct | | | | |
| 9a | therm_60 | LwaCas13a | GATTTAGACTACCCCAAAA | cttgcttcag | GATTTAGACTAC | thermo- | 9a |
| | | | ACGAAGGGGACTAAAACct | gaccatattt | CCCAAAAACGAA | nuclease | |
| | | | tgcttcaggaccatatttc | ctctacac | GGGGACTAAAAC | | |
| | | | tctacac | | | | |
| 9a | therm_61 | LwaCas13a | GATTTAGACTACCCCAAAA | cacttgcttc | GATTTAGACTAC | thermo- | 9a |
| | | | ACGAAGGGGACTAAAACca | aggaccatat | CCCAAAAACGAA | nuclease | |
| | | | cttgcttcaggaccatatt | ttctctac | GGGGACTAAAAC | | |
| | | | tctctac | | | | |
| 9a | therm_62 | LwaCas13a | GATTTAGACTACCCCAAAA | tgcacttgctt | GATTTAGACTAC | thermo- | 9a |
| | | | ACGAAGGGGACTAAAACtg | caggaccat | CCCAAAAACGAA | nuclease | |
| | | | cacttgcttcaggaccata | atttctct | GGGGACTAAAAC | | |
| | | | tttctct | | | | |
| 9a | therm_63 | LwaCas13a | GATTTAGACTACCCCAAAA | aatgcacttg | GATTTAGACTAC | thermo- | 9a |
| | | | ACGAAGGGGACTAAAACaa | cttcaggacc | CCCAAAAACGAA | nuclease | |
| | | | tgcacttgcttcaggacca | atatttct | GGGGACTAAAAC | | |
| | | | tatttct | | | | |
| 9a | therm_64 | LwaCas13a | GATTTAGACTACCCCAAAA | taaatgcact | GATTTAGACTAC | thermo- | 9a |
| | | | ACGAAGGGGACTAAAACta | tgcttcagga | CCCAAAAACGAA | nuclease | |
| | | | aatgcacttgcttcaggac | ccatattt | GGGGACTAAAAC | | |
| | | | catattt | | | | |
| 9a | therm_65 | LwaCas13a | GATTTAGACTACCCCAAAA | gtaaatgcac | GATTTAGACTAC | thermo- | 9a |
| | | | ACGAAGGGGACTAAAACgt | ttgcttcagg | CCCAAAAACGAA | nuclease | |
| | | | aaatgcacttgcttcagga | accatatt | GGGGACTAAAAC | | |
| | | | ccatatt | | | | |
| 9a | therm_66 | LwaCas13a | GATTTAGACTACCCCAAAA | cgtaaatgca | GATTTAGACTAC | thermo- | 9a |
| | | | ACGAAGGGGACTAAAACcg | cttgcttcag | CCCAAAAACGAA | nuclease | |
| | | | taaatgcacttgcttcagg | gaccatat | GGGGACTAAAAC | | |
| | | | accatat | | | | |
| 9a | therm_67 | LwaCas13a | GATTTAGACTACCCCAAAA | tcgtaaatgc | GATTTAGACTAC | thermo- | 9a |
| | | | ACGAAGGGGACTAAAACtc | acttgcttca | CCCAAAAACGAA | nuclease | |
| | | | gtaaatgcacttgcttcag | ggaccata | GGGGACTAAAAC | | |
| | | | gaccata | | | | |
| 9a | therm_68 | LwaCas13a | GATTTAGACTACCCCAAAA | ttcgtaaatg | GATTTAGACTAC | thermo- | 9a |
| | | | ACGAAGGGGACTAAAACtt | cacttgcttc | CCCAAAAACGAA | nuclease | |
| | | | cgtaaatgcacttgcttca | aggaccat | GGGGACTAAAAC | | |
| | | | ggaccat | | | | |
| 9a | therm_69 | LwaCas13a | GATTTAGACTACCCCAAAA | tttcgtaaatg | GATTTAGACTAC | thermo- | 9a |
| | | | ACGAAGGGGACTAAAACtt | cacttgcttc | CCCAAAAACGAA | nuclease | |
| | | | tcgtaaatgcacttgcttc | aggacca | GGGGACTAAAAC | | |
| | | | aggacca | | | | |
| 9a | therm_70 | LwaCas13a | GATTTAGACTACCCCAAAA | GATTTAGACTAC | ttttcgtaaat | thermo- | 9a |
| | | | ACGAAGGGGACTAAAACtt | gcacttgctt | CCCAAAAACGAA | nuclease | |
| | | | ttcgtaaatgcacttgctt | caggacc | GGGGACTAAAAC | | |
| | | | caggacc | | | | |
| 9a | therm_71 | LwaCas13a | GATTTAGACTACCCCAAAA | tttttcgtaaat | GATTTAGACTAC | thermo- | 9a |
| | | | ACGAAGGGGACTAAAACtt | gcacttgctt | CCCAAAAACGAA | nuclease | |
| | | | tttcgtaaatgcacttgct | caggac | GGGGACTAAAAC | | |
| | | | tcaggac | | | | |
| 9a | therm_72 | LwaCas13a | GATTTAGACTACCCCAAAA | ctttttcgtaa | GATTTAGACTAC | thermo- | 9a |
| | | | ACGAAGGGACTAAAACct | atgcacttgc | CCCAAAAACGAA | nuclease | |
| | | | ttttcgtaaatgcacttgc | ttcagga | GGGGACTAAAAC | | |
| | | | ttcagga | | | | |
| 9a | therm_73 | LwaCas13a | GATTTAGACTACCCCAAAA | tctttttcgtaa | GATTTAGACTAC | thermo- | 9a |
| | | | ACGAAGGGGACTAAAACtc | atgcacttgc | CCCAAAAACGAA | nuclease | |
| | | | tttttcgtaaatgcacttg | ttcagg | GGGGACTAAAAC | | |
| | | | cttcagg | | | | |
| 9a | therm_74 | LwaCas13a | GATTTAGACTACCCCAAAA | atctttttcgta | GATTTAGACTAC | thermo- | 9a |
| | | | ACGAAGGGGACTAAAACat | aatgcacttg | CCCAAAAACGAA | nuclease | |
| | | | ctttttcgtaaatgcactt | cttcag | GGGGACTAAAAC | | |
| | | | gcttcag | | | | |
| 9a | therm_75 | LwaCas13a | GATTTAGACTACCCCAAAA | catctttttcgt | GATTTAGACTAC | thermo- | 9a |
| | | | ACGAAGGGGACTAAAACca | aaatgcactt | CCCAAAAACGAA | nuclease | |
| | | | tctttttcgtaaatgcact | gcttca | GGGGACTAAAAC | | |
| | | | tgcttca | | | | |
| 9a | therm_76 | LwaCas13a | GATTTAGACTACCCCAAAA | ccatctttttc | GATTTAGACTAC | thermo- | 9a |
| | | | ACGAAGGGGACTAAAACcc | gtaaatgcac | CCCAAAAACGAA | nuclease | |
| | | | atctttttcgtaaatgcac | ttgcttc | GGGGACTAAAAC | | |
| | | | ttgcttc | | | | |
| 9a | therm_77 | LwaCas13a | GATTTAGACTACCCCAAAA | accatcttttt | GATTTAGACTAC | thermo- | 9a |
| | | | ACGAAGGGGACTAAAACac | cgtaaatgca | CCCAAAAACGAA | nuclease | |
| | | | catctttttcgtaaatgca | cttgctt | GGGGACTAAAAC | | |
| | | | cttgctt | | | | |
| 9a | therm_78 | LwaCas13a | GATTTAGACTACCCCAAAA | taccatcttttt | GATTTAGACTAC | thermo- | 9a |
| | | | ACGAAGGGGACTAAAACta | cgtaaatgca | CCCAAAAACGAA | nuclease | |
| | | | ccatctttttcgtaaatgc | cttgct | GGGGACTAAAAC | | |
| | | | acttgct | | | | |
| 9a | therm_79 | LwaCas13a | GATTTAGACTACCCCAAAA | ctaccatcttt | GATTTAGACTAC | thermo- | 9a |
| | | | ACGAAGGGGACTAAAACct | ttcgtaaatg | CCCAAAAACGAA | nuclease | |
| | | | accatctttttcgtaaatg | cacttgc | GGGGACTAAAAC | | |
| | | | cacttgc | | | | |
| 9a | therm_80 | LwaCas13a | GATTTAGACTACCCCAAAA | tctaccatctt | GATTTAGACTAC | thermo- | 9a |
| | | | ACGAAGGGGACTAAAACtc | tttcgtaaatg | CCCAAAAACGAA | nuclease | |
| | | | taccatctttttcgtaaat | cacttg | GGGGACTAAAAC | | |
| | | | gcacttg | | | | |
| 9a | therm_81 | LwaCas13a | GATTTAGACTACCCCAAAA | ttctaccatct | GATTTAGACTAC | thermo- | 9a |
| | | | ACGAAGGGGACTAAAACtt | ttttcgtaaat | CCCAAAAACGAA | nuclease | |
| | | | ctaccatctttttcgtaaa | gcactt | GGGGACTAAAAC | | |
| | | | tgcactt | | | | |
| 9a | therm_82 | LwaCas13a | GATTTAGACTACCCCAAAA | tttctaccatc | GATTTAGACTAC | thermo- | 9a |
| | | | ACGAAGGGGACTAAAACtt | tttttcgtaaat | CCCAAAAACGAA | nuclease | |
| | | | tctaccatctttttcgtaa | gcact | GGGGACTAAAAC | | |
| | | | atgcact | | | | |
| 9a | therm_83 | LwaCas13a | GATTTAGACTACCCCAAAA | ttttctaccat | GATTTAGACTAC | thermo- | 9a |
| | | | ACGAAGGGGACTAAAACtt | ctttttcgtaa | CCCAAAAACGAA | nuclease | |
| | | | ttctaccatctttttcgta | atgcac | GGGGACTAAAAC | | |
| | | | aatgcac | | | | |
| 9a | therm_84 | LwaCas13a | GATTTAGACTACCCCAAAA | attttctacca | GATTTAGACTAC | thermo- | 9a |
| | | | ACGAAGGGGACTAAAACat | tctttttcgtaa | CCCAAAAACGAA | nuclease | |
| | | | tttctaccatctttttcgt | atgca | GGGGACTAAAAC | | |
| | | | aaatgca | | | | |
| 9a | therm_85 | LwaCas13a | GATTTAGACTACCCCAAAA | cattttctacc | GATTTAGACTAC | thermo- | 9a |
| | | | ACGAAGGGGACTAAAACca | atctttttcgta | CCCAAAAACGAA | nuclease | |
| | | | ttttctaccatctttttcg | aatgc | GGGGACTAAAAC | | |
| | | | taaatgc | | | | |
| 9a | therm_86 | LwaCas13a | GATTTAGACTACCCCAAAA | gcattttctac | GATTTAGACTAC | thermo- | 9a |
| | | | ACGAAGGGGACTAAAACgc | catctttttcgt | CCCAAAAACGAA | nuclease | |
| | | | attttctaccatctttttc | aaatg | GGGGACTAAAAC | | |
| | | | gtaaatg | | | | |
| 9a | therm_87 | LwaCas13a | GATTTAGACTACCCCAAAA | tgcattttcta | GATTTAGACTAC | thermo- | 9a |
| | | | ACGAAGGGGACTAAAACtg | ccatctttttc | CCCAAAAACGAA | nuclease | |
| | | | cattttctaccatcttttt | gtaaat | GGGGACTAAAAC | | |
| | | | cgtaaat | | | | |
| 9a | therm_88 | LwaCas13a | GATTTAGACTACCCCAAAA | ttgcattttcta | GATTTAGACTAC | thermo- | 9a |
| | | | ACGAAGGGGACTAAAACtt | ccatctttttc | CCCAAAAACGAA | nuclease | |
| | | | gcattttctaccatctttt | gtaaa | GGGGACTAAAAC | | |
| | | | tcgtaaa | | | | |
| 9a | therm_89 | LwaCas13a | GATTTAGACTACCCCAAAA | tttgcattttct | GATTTAGACTAC | thermo- | 9a |
| | | | ACGAAGGGGACTAAAACtt | accatcttttt | CCCAAAAACGAA | nuclease | |
| | | | tgcattttctaccatcttt | cgtaa | GGGGACTAAAAC | | |
| | | | ttcgtaa | | | | |
| 9a | therm_90 | LwaCas13a | GATTTAGACTACCCCAAAA | ctttgcattttc | GATTTAGACTAC | thermo- | 9a |
| | | | ACGAAGGGGACTAAAACct | CCCAAAAACGAA | taccatcttttt | nuclease | |
| | | | ttgcattttctaccatctt | cgta | GGGGACTAAAAC | | |
| | | | tttcgta | | | | |
| 9a | therm_91 | LwaCas13a | GATTTAGACTACCCCAAAA | tctttgcatttt | GATTTAGACTAC | thermo- | 9a |
| | | | ACGAAGGGGACTAAAACtc | ctaccatcttt | CCCAAAAACGAA | nuclease | |
| | | | tttgcattttctaccatct | ttcgt | GGGGACTAAAAC | | |
| | | | ttttcgt | | | | |
| 9a | therm_92 | LwaCas13a | GATTTAGACTACCCCAAAA | ttctttgcattt | GATTTAGACTAC | thermo- | 9a |
| | | | ACGAAGGGGACTAAAACtt | tctaccatctt | CCCAAAAACGAA | nuclease | |
| | | | ctttgcattttctaccatc | tttcg | GGGGACTAAAAC | | |
| | | | tttttcg | | | | |
| 9a | therm_93 | LwaCas13a | GATTTAGACTACCCCAAAA | tttctttgcatt | GATTTAGACTAC | thermo- | 9a |
| | | | ACGAAGGGGACTAAAACtt | ttctaccatct | CCCAAAAACGAA | nuclease | |
| | | | tctttgcattttctaccat | ttttc | GGGGACTAAAAC | | |
| | | | ctttttc | | | | |
| 9a | therm_94 | LwaCas13a | GATTTAGACTACCCCAAAA | ttttctttgcat | GATTTAGACTAC | thermo- | 9a |
| | | | ACGAAGGGGACTAAAACtt | tttctaccatc | CCCAAAAACGAA | nuclease | |
| | | | ttctttgcattttctacca | ttttt | GGGGACTAAAAC | | |
| | | | tcttttt | | | | |
| 9a | therm_95 | LwaCas13a | GATTTAGACTACCCCAAAA | attttctttgca | GATTTAGACTAC | thermo- | 9a |
| | | | ACGAAGGGGACTAAAACat | ttttctaccat | CCCAAAAACGAA | nuclease | |
| | | | tttctttgcattttctacc | ctttt | GGGGACTAAAAC | | |
| | | | atctttt | | | | |
| 11b | zika_00 | LwaCas13a | GATTTAGACTACCCCAAAA | tgttgttccag | GATTTAGACTAC | Zika | 1b |
| | | | ACGAAGGGGACTAAAACtg | tgtggagttc | CCCAAAAACGAA | ssRNA | |
| | | | ttgttccagtgtggagttc | cggtgtc | GGGGACTAAAAC | | |
| | | | cggtgtc | | | | |
| 11b | zika_01 | LwaCas13a | GATTTAGACTACCCCAAAA | ttgttgttcca | GATTTAGACTAC | Zika | 1b |
| | | | ACGAAGGGGACTAAAACtt | gtgtggagtt | CCCAAAAACGAA | ssRNA | |
| | | | gttgttccagtgtggagtt | ccggtgt | GGGGACTAAAAC | | |
| | | | ccggtgt | | | | |
| 11b | zika_02 | LwaCas13a | GATTTAGACTACCCCAAAA | tttgttgttcc | GATTTAGACTAC | Zika | 1b |
| | | | ACGAAGGGGACTAAAACtt | agtgtggagt | CCCAAAAACGAA | ssRNA | |
| | | | tgttgttccagtgtggagt | tccggtg | GGGGACTAAAAC | | |
| | | | tccggtg | | | | |
| 11b | zika_03 | LwaCas13a | GATTTAGACTACCCCAAAA | ctttgttgttc | GATTTAGACTAC | Zika | 1b |
| | | | ACGAAGGGGACTAAAACct | cagtgtgga | CCCAAAAACGAA | ssRNA | |
| | | | ttgttgttccagtgtggag | gttccggt | GGGGACTAAAAC | | |
| | | | ttccggt | | | | |
| 11b | zika_04 | LwaCas13a | GATTTAGACTACCCCAAAA | tctttgttgttc | GATTTAGACTAC | Zika | 1b |
| | | | ACGAAGGGGACTAAAACtc | cagtgtgga | CCCAAAAACGAA | ssRNA | |
| | | | tttgttgttccagtgtgga | gttccgg | GGGGACTAAAAC | | |
| | | | gttccgg | | | | |
| 11b | zika_05 | LwaCas13a | GATTTAGACTACCCCAAAA | ttctttgttgtt | GATTTAGACTAC | Zika | 1b |
| | | | ACGAAGGGGACTAAAACtt | ccagtgtgg | CCCAAAAACGAA | ssRNA | |
| | | | ctttgttgttccagtgtgg | agttccg | GGGGACTAAAAC | | |
| | | | agttccg | | | | |
| 11b | zika_06 | LwaCas13a | GATTTAGACTACCCCAAAA | cttctttgagt | GATTTAGACTAC | Zika | 1b |
| | | | ACGAAGGGGACTAAAACct | tccagtgtgg | CCCAAAAACGAA | ssRNA | |
| | | | tctttgttgttccagtgtg | agttcc | GGGGACTAAAAC | | |
| | | | gagttcc | | | | |
| 11b | zika_07 | LwaCas13a | GATTTAGACTACCCCAAAA | gcttctttgtt | GATTTAGACTAC | Zika | 1b |
| | | | ACGAAGGGGACTAAAACgc | gttccagtgt | CCCAAAAACGAA | ssRNA | |
| | | | ttctttgttgttccagtgt | ggagttc | GGGGACTAAAAC | | |
| | | | ggagttc | | | | |
| 11b | zika_08 | LwaCas13a | GATTTAGACTACCCCAAAA | tgcttctttgtt | GATTTAGACTAC | Zika | 1b |
| | | | ACGAAGGGGACTAAAACtg | gttccagtgt | CCCAAAAACGAA | ssRNA | |
| | | | cttctttgttgttccagtg | ggagtt | GGGGACTAAAAC | | |
| | | | tggagtt | | | | |
| 11b | zika_09 | LwaCas13a | GATTTAGACTACCCCAAAA | gtgcttctttg | GATTTAGACTAC | Zika | 1b |
| | | | ACGAAGGGGACTAAAACgt | ttgttccagtg | CCCAAAAACGAA | ssRNA | |
| | | | gcttctttgttgttccagt | tggagt | GGGGACTAAAAC | | |
| | | | gtggagt | | | | |
| 11b | zika_10 | LwaCas13a | GATTTAGACTACCCCAAAA | agtgcttcttt | GATTTAGACTAC | Zika | 1b |
| | | | ACGAAGGGGACTAAAACag | gagttccagt | CCCAAAAACGAA | ssRNA | |
| | | | tgcttctttgttgttccag | gtggag | GGGGACTAAAAC | | |
| | | | tgtggag | | | | |
| 11b | zika_11 | LwaCas13a | GATTTAGACTACCCCAAAA | cagtgcttctt | GATTTAGACTAC | Zika | 1b |
| | | | ACGAAGGGGACTAAAACca | tgttgttccag | CCCAAAAACGAA | ssRNA | |
| | | | gtgcttctttgttgttcca | tgtgga | GGGGACTAAAAC | | |
| | | | gtgtgga | | | | |
| 11b | zika_12 | LwaCas13a | GATTTAGACTACCCCAAAA | ccagtgcttc | GATTTAGACTAC | Zika | 1b |
| | | | ACGAAGGGGACTAAAACcc | tttgagacc | CCCAAAAACGAA | ssRNA | |
| | | | agtgcttctttgttgttcc | agtgtgg | GGGGACTAAAAC | | |
| | | | agtgtgg | | | | |
| 11b | zika_13 | LwaCas13a | GATTTAGACTACCCCAAAA | accagtgctt | GATTTAGACTAC | Zika | 1b |
| | | | ACGAAGGGGACTAAAACac | ctttgagttc | CCCAAAAACGAA | ssRNA | |
| | | | cagtgcttctttgttgttc | cagtgtg | GGGGACTAAAAC | | |
| | | | cagtgtg | | | | |
| 11b | zika_14 | LwaCas13a | GATTTAGACTACCCCAAAA | taccagtgct | GATTTAGACTAC | Zika | 1b |
| | | | ACGAAGGGGACTAAAACta | tctttgttgttc | CCCAAAAACGAA | ssRNA | |
| | | | ccagtgcttctttgttgtt | cagtgt | GGGGACTAAAAC | | |
| | | | ccagtgt | | | | |
| 11b | zika_15 | LwaCas13a | GATTTAGACTACCCCAAAA | ctaccagtgc | GATTTAGACTAC | Zika | 1b |
| | | | ACGAAGGGGACTAAAACct | ttctttgttgtt | CCCAAAAACGAA | ssRNA | |
| | | | accagtgcttctttgttgt | ccagtg | GGGGACTAAAAC | | |
| | | | tccagtg | | | | |
| 11b | zika_16 | LwaCas13a | GATTTAGACTACCCCAAAA | tctaccagtg | GATTTAGACTAC | Zika | 1b |
| | | | ACGAAGGGGACTAAAACtc | cttctttgagt | CCCAAAAACGAA | ssRNA | |
| | | | taccagtgcttctttgttg | tccagt | GGGGACTAAAAC | | |
| | | | ttccagt | | | | |
| 11b | zika_17 | LwaCas13a | GATTTAGACTACCCCAAAA | ctctaccagt | GATTTAGACTAC | Zika | 1b |
| | | | ACGAAGGGGACTAAAACct | gcttctttgtt | CCCAAAAACGAA | ssRNA | |
| | | | ctaccagtgcttctttgtt | gttccag | GGGGACTAAAAC | | |
| | | | gttccag | | | | |
| 11b | zika_18 | LwaCas13a | GATTTAGACTACCCCAAAA | actctaccag | GATTTAGACTAC | Zika | 1b |
| | | | ACGAAGGGGACTAAAACac | tgcttctttgtt | CCCAAAAACGAA | ssRNA | |
| | | | tctaccagtgcttctttgt | gttcca | GGGGACTAAAAC | | |
| | | | tgttcca | | | | |
| 11b | zika_19 | LwaCas13a | GATTTAGACTACCCCAAAA | aactctacca | GATTTAGACTAC | Zika | 1b |
| | | | ACGAAGGGGACTAAAACaa | gtgcttctttg | CCCAAAAACGAA | ssRNA | |
| | | | ctctaccagtgcttctttg | ttgttcc | GGGGACTAAAAC | | |
| | | | ttgttcc | | | | |
| 11b | zika_20 | LwaCas13a | GATTTAGACTACCCCAAAA | tgaactctac | GATTTAGACTAC | Zika | 1b |
| | | | ACGAAGGGGACTAAAACtg | cagtgcttctt | CCCAAAAACGAA | ssRNA | |
| | | | aactctaccagtgcttctt | tgttgtt | GGGGACTAAAAC | | |
| | | | tgttgtt | | | | |
| 11b | zika_21 | LwaCas13a | GATTTAGACTACCCCAAAA | cttgaactct | GATTTAGACTAC | Zika | 1b |
| | | | ACGAAGGGGACTAAAACct | accagtgctt | CCCAAAAACGAA | ssRNA | |
| | | | tgaactctaccagtgcttc | ctttgttg | GGGGACTAAAAC | | |
| | | | tttgttg | | | | |
| 11b | zika_22 | LwaCas13a | GATTTAGACTACCCCAAAA | tccttgaact | GATTTAGACTAC | Zika | 1b |
| | | | ACGAAGGGGACTAAAACtc | ctaccagtgc | CCCAAAAACGAA | ssRNA | |
| | | | cttgaactctaccagtgct | ttctttgt | GGGGACTAAAAC | | |
| | | | tctttgt | | | | |
| 11b | zika_23 | LwaCas13a | GATTTAGACTACCCCAAAA | cgtccttgaa | GATTTAGACTAC | Zika | 1b |
| | | | ACGAAGGGGACTAAAACcg | ctctaccagt | CCCAAAAACGAA | ssRNA | |
| | | | tccttgaactctaccagtg | gcttcttt | GGGGACTAAAAC | | |
| | | | cttcttt | | | | |
| 11b | zika_24 | LwaCas13a | GATTTAGACTACCCCAAAA | tgcgtccttg | GATTTAGACTAC | Zika | 1b |
| | | | ACGAAGGGGACTAAAACtg | aactctacca | CCCAAAAACGAA | ssRNA | |
| | | | cgtccttgaactctaccag | gtgcttct | GGGGACTAAAAC | | |
| | | | tgcttct | | | | |
| 11b | zika_25 | LwaCas13a | GATTTAGACTACCCCAAAA | tgtgcgtcctt | GATTTAGACTAC | Zika | 1b |
| | | | ACGAAGGGGACTAAAACtg | gaactctacc | CCCAAAAACGAA | ssRNA | |
| | | | tgcgtccttgaactctacc | agtgctt | GGGGACTAAAAC | | |
| | | | agtgctt | | | | |
| 11b | zika_26 | LwaCas13a | GATTTAGACTACCCCAAAA | catgtgcgtc | GATTTAGACTAC | Zika | 1b |
| | | | ACGAAGGGGACTAAAACca | cttgaactct | CCCAAAAACGAA | ssRNA | |
| | | | tgtgcgtccttgaactcta | accagtgc | GGGGACTAAAAC | | |
| | | | ccagtgc | | | | |
| 11b | zika_27 | LwaCas13a | GATTTAGACTACCCCAAAA | ggcatgtgc | GATTTAGACTAC | Zika | 1b |
| | | | ACGAAGGGGACTAAAACgg | gtccttgaac | CCCAAAAACGAA | ssRNA | |
| | | | catgtgcgtccttgaactc | tctaccagt | GGGGACTAAAAC | | |
| | | | taccagt | | | | |
| 11b | zika_28 | LwaCas13a | GATTTAGACTACCCCAAAA | ttggcatgtg | GATTTAGACTAC | Zika | 1b |
| | | | ACGAAGGGGACTAAAACtt | cgtccttgaa | CCCAAAAACGAA | ssRNA | |
| | | | ggcatgtgcgtccttgaac | ctctacca | GGGGACTAAAAC | | |
| | | | tctacca | | | | |
| 11b | zika_29 | LwaCas13a | GATTTAGACTACCCCAAAA | ttttggcatgt | GATTTAGACTAC | Zika | 1b |
| | | | ACGAAGGGGACTAAAACtt | gcgtccttga | CCCAAAAACGAA | ssRNA | |
| | | | ttggcatgtgcgtccttga | actctac | GGGGACTAAAAC | | |
| | | | actctac | | | | |
| 11b | zika_30 | LwaCas13a | GATTTAGACTACCCCAAAA | ccttttggcat | GATTTAGACTAC | Zika | 1b |
| | | | ACGAAGGGGACTAAAACcc | gtgcgtcctt | CCCAAAAACGAA | ssRNA | |
| | | | ttttggcatgtgcgtcctt | gaactct | GGGGACTAAAAC | | |
| | | | gaactct | | | | |
| 11b | zika_31 | LwaCas13a | GATTTAGACTACCCCAAAA | tgccttttggc | GATTTAGACTAC | Zika | 1b |
| | | | ACGAAGGGGACTAAAACtg | atgtgcgtcc | CCCAAAAACGAA | ssRNA | |
| | | | ccttttggcatgtgcgtcc | ttgaact | GGGGACTAAAAC | | |
| | | | ttgaact | | | | |
| 11b | zika_32 | LwaCas13a | GATTTAGACTACCCCAAAA | tttgccttttg | GATTTAGACTAC | Zika | 1b |
| | | | ACGAAGGGGACTAAAACtt | gcatgtgcgt | CCCAAAAACGAA | ssRNA | |
| | | | tgccttttggcatgtgcgt | ccttgaa | GGGGACTAAAAC | | |
| | | | ccttgaa | | | | |
| 11b | zika_33 | LwaCas13a | GATTTAGACTACCCCAAAA | agtttgccttt | GATTTAGACTAC | Zika | 1b |
| | | | ACGAAGGGGACTAAAACag | tggcatgtgc | CCCAAAAACGAA | ssRNA | |
| | | | tttgccttttggcatgtgc | gtccttg | GGGGACTAAAAC | | |
| | | | gtccttg | | | | |
| 11b | zika_34 | LwaCas13a | GATTTAGACTACCCCAAAA | acagtttgcc | GATTTAGACTAC | Zika | 1b |
| | | | ACGAAGGGGACTAAAACac | ttttggcatgt | CCCAAAAACGAA | ssRNA | |
| | | | agtttgccttttggcatgt | gcgtcct | GGGGACTAAAAC | | |
| | | | gcgtcct | | | | |
| 11b | zika_35 | LwaCas13a | GATTTAGACTACCCCAAAA | cgacagtttg | GATTTAGACTAC | Zika | 1b |
| | | | ACGAAGGGGACTAAAACcg | ccttttggcat | CCCAAAAACGAA | ssRNA | |
| | | | acagtttgccttttggcat | gtgcgtc | GGGGACTAAAAC | | |
| | | | gtgcgtc | | | | |
| 11b | zika_36 | LwaCas13a | GATTTAGACTACCCCAAAA | cacgacagtt | GATTTAGACTAC | Zika | 1b |
| | | | ACGAAGGGGACTAAAACca | tgccttttggc | CCCAAAAACGAA | ssRNA | |
| | | | cgacagtttgccttttggc | atgtgcg | GGGGACTAAAAC | | |
| | | | atgtgcg | | | | |
| 11b | zika_37 | LwaCas13a | GATTTAGACTACCCCAAAA | accacgaca | GATTTAGACTAC | Zika | 1b |
| | | | ACGAAGGGGACTAAAACac | gtttgcctttt | CCCAAAAACGAA | ssRNA | |
| | | | cacgacagtttgccttttg | ggcatgtg | GGGGACTAAAAC | | |
| | | | gcatgtg | | | | |
| 11b | zika_38 | LwaCas13a | GATTTAGACTACCCCAAAA | gaaccacga | GATTTAGACTAC | Zika | 1b |
| | | | ACGAAGGGGACTAAAACga | cagtttgcctt | CCCAAAAACGAA | ssRNA | |
| | | | accacgacagtttgccttt | ttggcatg | GGGGACTAAAAC | | |
| | | | tggcatg | | | | |
| 11b | zika_39 | LwaCas13a | GATTTAGACTACCCCAAAA | tagaaccac | GATTTAGACTAC | Zika | 1b |
| | | | ACGAAGGGGACTAAAACta | gacagtttgc | CCCAAAAACGAA | ssRNA | |
| | | | gaaccacgacagtttgcct | cttttggca | GGGGACTAAAAC | | |
| | | | tttggca | | | | |
| 11b | zika_40 | LwaCas13a | GATTTAGACTACCCCAAAA | cctagaacc | GATTTAGACTAC | Zika | 1b |
| | | | ACGAAGGGGACTAAAACcc | acgacagttt | CCCAAAAACGAA | ssRNA | |
| | | | tagaaccacgacagtttgc | gccttttgg | GGGGACTAAAAC | | |
| | | | cttttgg | | | | |
| 11b | zika_41 | LwaCas13a | GATTTAGACTACCCCAAAA | tccctagaac | GATTTAGACTAC | Zika | 1b |
| | | | ACGAAGGGGACTAAAACtc | cacgacagtt | CCCAAAAACGAA | ssRNA | |
| | | | cctagaaccacgacagttt | tgcctttt | GGGGACTAAAAC | | |
| | | | gcctttt | | | | |
| 11b | zika_42 | LwaCas13a | GATTTAGACTACCCCAAAA | actccctaga | GATTTAGACTAC | Zika | 1b |
| | | | ACGAAGGGGACTAAAACac | accacgaca | CCCAAAAACGAA | ssRNA | |
| | | | tccctagaaccacgacagt | gtttgcctt | GGGGACTAAAAC | | |
| | | | ttgcctt | | | | |
| 11b | zika_43 | LwaCas 13a | GATTTAGACTACCCCAAAA | tgactcccta | GATTTAGACTAC | Zika | 1b |
| | | | ACGAAGGGGACTAAAACtg | gaaccacga | CCCAAAAACGAA | ssRNA | |
| | | | actccctagaaccacgaca | cagtttgcc | GGGGACTAAAAC | | |
| | | | gtttgcc | | | | |
| 11b | zika_44 | LwaCas13a | GATTTAGACTACCCCAAAA | cttgactccc | GATTTAGACTAC | Zika | 1b |
| | | | ACGAAGGGGACTAAAACct | tagaaccac | CCCAAAAACGAA | ssRNA | |
| | | | tgactccctagaaccacga | gacagtttg | GGGGACTAAAAC | | |
| | | | cagtttg | | | | |
| 11b | zika_45 | LwaCas13a | GATTTAGACTACCCCAAAA | ttcttgactcc | GATTTAGACTAC | Zika | 1b |
| | | | ACGAAGGGGACTAAAACtt | ctagaacca | CCCAAAAACGAA | ssRNA | |
| | | | cttgactccctagaaccac | cgacagtt | GGGGACTAAAAC | | |
| | | | gacagtt | | | | |
| 11b | zika_46 | LwaCas13a | GATTTAGACTACCCCAAAA | ccttcttgact | GATTTAGACTAC | Zika | 1b |
| | | | ACGAAGGGGACTAAAACcc | ccctagaac | CCCAAAAACGAA | ssRNA | |
| | | | ttcttgactccctagaacc | cacgacag | GGGGACTAAAAC | | |
| | | | acgacag | | | | |
| 11b | zika_47 | LwaCas13a | GATTTAGACTACCCCAAAA | ctccttcttga | GATTTAGACTAC | Zika | 1b |
| | | | ACGAAGGGGACTAAAACct | ctccctagaa | CCCAAAAACGAA | ssRNA | |
| | | | ccttcttgactccctagaa | ccacgac | GGGGACTAAAAC | | |
| | | | ccacgac | | | | |
| 11b | zika_48 | LwaCas13a | GATTTAGACTACCCCAAAA | tgctccttctt | GATTTAGACTAC | Zika | 1b |
| | | | ACGAAGGGGACTAAAACtg | gactccctag | CCCAAAAACGAA | ssRNA | |
| | | | ctccttcttgactccctag | aaccacg | GGGGACTAAAAC | | |
| | | | aaccacg | | | | |
| 11b | zika_49 | LwaCas13a | GATTTAGACTACCCCAAAA | actgctcctt | GATTTAGACTAC | Zika | 1b |
| | | | ACGAAGGGGACTAAAACac | cttgactccc | CCCAAAAACGAA | ssRNA | |
| | | | tgctccttcttgactccct | tagaacca | GGGGACTAAAAC | | |
| | | | agaacca | | | | |
| 11b | zika_50 | LwaCas13a | GATTTAGACTACCCCAAAA | gaactgctcc | GATTTAGACTAC | Zika | 1b |
| | | | ACGAAGGGGACTAAAACga | ttcttgactcc | CCCAAAAACGAA | ssRNA | |
| | | | actgctccttcttgactcc | ctagaac | GGGGACTAAAAC | | |
| | | | ctagaac | | | | |
| 11b | zika_51 | LwaCas13a | GATTTAGACTACCCCAAAA | gtgaactgct | GATTTAGACTAC | Zika | 1b |
| | | | ACGAAGGGGACTAAAACgt | ccttcttgact | CCCAAAAACGAA | ssRNA | |
| | | | gaactgctccttcttgact | ccctaga | GGGGACTAAAAC | | |
| | | | ccctaga | | | | |
| 11b | zika_52 | LwaCas13a | GATTTAGACTACCCCAAAA | gtgtgaactg | GATTTAGACTAC | Zika | 1b |
| | | | ACGAAGGGGACTAAAACgt | ctccttcttga | CCCAAAAACGAA | ssRNA | |
| | | | gtgaactgctccttcttga | ctcccta | GGGGACTAAAAC | | |
| | | | ctcccta | | | | |
| 11b | zika_53 | LwaCas13a | GATTTAGACTACCCCAAAA | ccgtgtgaa | GATTTAGACTAC | Zika | 1b |
| | | | ACGAAGGGGACTAAAACcc | ctgctccttct | CCCAAAAACGAA | ssRNA | |
| | | | gtgtgaactgctccttctt | tgactccc | GGGGACTAAAAC | | |
| | | | gactccc | | | | |
| 11b | zika_54 | LwaCas13a | GATTTAGACTACCCCAAAA | ggccgtgtg | GATTTAGACTAC | Zika | 1b |
| | | | ACGAAGGGGACTAAAACgg | aactgctcct | CCCAAAAACGAA | ssRNA | |
| | | | ccgtgtgaactgctccttc | tcttgactc | GGGGACTAAAAC | | |
| | | | ttgactc | | | | |
| 11b | zika_55 | LwaCas13a | GATTTAGACTACCCCAAAA | agggccgtg | GATTTAGACTAC | Zika | 1b |
| | | | ACGAAGGGGACTAAAACag | tgaactgctc | CCCAAAAACGAA | ssRNA | |
| | | | ggccgtgtgaactgctcct | cttcttgac | GGGGACTAAAAC | | |
| | | | tcttgac | | | | |
| 11b | zika_56 | LwaCas13a | GATTTAGACTACCCCAAAA | caagggccg | GATTTAGACTAC | Zika | 1b |
| | | | ACGAAGGGGACTAAAACca | tgtgaactgc | CCCAAAAACGAA | ssRNA | |
| | | | agggccgtgtgaactgctc | tccttcttg | GGGGACTAAAAC | | |
| | | | cttcttg | | | | |
| 11b | zika_57 | LwaCas13a | GATTTAGACTACCCCAAAA | agcaagggc | GATTTAGACTAC | Zika | 1b |
| | | | ACGAAGGGGACTAAAACag | cgtgtgaact | CCCAAAAACGAA | ssRNA | |
| | | | caagggccgtgtgaactgc | gctccttct | GGGGACTAAAAC | | |
| | | | tccttct | | | | |
| 11b | zika_58 | LwaCas13a | GATTTAGACTACCCCAAAA | ccagcaagg | GATTTAGACTAC | Zika | 1b |
| | | | ACGAAGGGGACTAAAACcc | gccgtgtga | CCCAAAAACGAA | ssRNA | |
| | | | agcaagggccgtgtgaact | actgctcctt | GGGGACTAAAAC | | |
| | | | gctcctt | | | | |
| 11b | zika_59 | LwaCas13a | GATTTAGACTACCCCAAAA | ctccagcaa | GATTTAGACTAC | Zika | 1b |
| | | | ACGAAGGGGACTAAAACct | gggccgtgt | CCCAAAAACGAA | ssRNA | |
| | | | ccagcaagggccgtgtgaa | gaactgctcc | GGGGACTAAAAC | | |
| | | | ctgctcc | | | | |
| 11b | zika_60 | LwaCas13a | GATTTAGACTACCCCAAAA | agctccagc | GATTTAGACTAC | Zika | 1b |
| | | | ACGAAGGGGACTAAAACag | aagggccgt | CCCAAAAACGAA | ssRNA | |
| | | | ctccagcaagggccgtgtg | gtgaactgct | GGGGACTAAAAC | | |
| | | | aactgct | | | | |
| 11b | zika_61 | LwaCas13a | GATTTAGACTACCCCAAAA | agagctcca | GATTTAGACTAC | Zika | 1b |
| | | | ACGAAGGGGACTAAAACag | gcaagggcc | CCCAAAAACGAA | ssRNA | |
| | | | agctccagcaagggccgtg | gtgtgaactg | GGGGACTAAAAC | | |
| | | | tgaactg | | | | |
| 11b | zika_62 | LwaCas13a | GATTTAGACTACCCCAAAA | ccagagctc | GATTTAGACTAC | Zika | 1b |
| | | | ACGAAGGGGACTAAAACcc | cagcaaggg | CCCAAAAACGAA | ssRNA | |
| | | | agagctccagcaagggccg | ccgtgtgaa | GGGGACTAAAAC | | |
| | | | tgtgaac | c | | | |
| 11b | zika_63 | LwaCas13a | GATTTAGACTACCCCAAAA | ctccagagct | GATTTAGACTAC | Zika | 1b |
| | | | ACGAAGGGGACTAAAACct | ccagcaagg | CCCAAAAACGAA | ssRNA | |
| | | | ccagagctccagcaagggc | gccgtgtga | GGGGACTAAAAC | | |
| | | | cgtgtga | | | | |
| 11b | zika_64 | LwaCas13a | GATTTAGACTACCCCAAAA | gcctccaga | GATTTAGACTAC | Zika | 1b |
| | | | ACGAAGGGGACTAAAACgc | gctccagca | CCCAAAAACGAA | ssRNA | |
| | | | ctccagagctccagcaagg | agggccgtg | GGGGACTAAAAC | | |
| | | | gccgtgt | t | | | |
| 11b | zika_65 | LwaCas13a | GATTTAGACTACCCCAAAA | cagcctcca | GATTTAGACTAC | Zika | 1b |
| | | | ACGAAGGGGACTAAAACca | gagctccag | CCCAAAAACGAA | ssRNA | |
| | | | gcctccagagctccagcaa | caagggccg | GGGGACTAAAAC | | |
| | | | gggccgt | t | | | |
| 11b | zika_66 | LwaCas13a | GATTTAGACTACCCCAAAA | ctcagcctcc | GATTTAGACTAC | Zika | 1b |
| | | | ACGAAGGGGACTAAAACct | agagctcca | CCCAAAAACGAA | ssRNA | |
| | | | cagcctccagagctccagc | gcaagggcc | GGGGACTAAAAC | | |
| | | | aagggcc | | | | |
| 11b | zika_67 | LwaCas13a | GATTTAGACTACCCCAAAA | atctcagcct | GATTTAGACTAC | Zika | 1b |
| | | | ACGAAGGGGACTAAAACat | ccagagctc | CCCAAAAACGAA | ssRNA | |
| | | | ctcagcctccagagctcca | cagcaaggg | GGGGACTAAAAC | | |
| | | | gcaaggg | | | | |
| 11b | zika_68 | LwaCas13a | GATTTAGACTACCCCAAAA | catctcagcc | GATTTAGACTAC | Zika | 1b |
| | | | ACGAAGGGGACTAAAACca | tccagagctc | CCCAAAAACGAA | ssRNA | |
| | | | tctcagcctccagagctcc | cagcaagg | GGGGACTAAAAC | | |
| | | | agcaagg | | | | |
| 11b | zika_69 | LwaCas13a | GATTTAGACTACCCCAAAA | ccatctcagc | GATTTAGACTAC | Zika | 1b |
| | | | ACGAAGGGGACTAAAACcc | ctccagagct | CCCAAAAACGAA | ssRNA | |
| | | | atctcagcctccagagctc | ccagcaag | GGGGACTAAAAC | | |
| | | | cagcaag | | | | |
| 11b | zika_70 | LwaCas13a | GATTTAGACTACCCCAAAA | tccatctcag | GATTTAGACTAC | Zika | 1b |
| | | | ACGAAGGGGACTAAAACtc | cctccagag | CCCAAAAACGAA | ssRNA | |
| | | | catctcagcctccagagct | ctccagcaa | GGGGACTAAAAC | | |
| | | | ccagcaa | | | | |
| 11b | zika_71 | LwaCas13a | GATTTAGACTACCCCAAAA | atccatctca | GATTTAGACTAC | Zika | 1b |
| | | | ACGAAGGGGACTAAAACat | gcctccaga | CCCAAAAACGAA | ssRNA | |
| | | | ccatctcagcctccagagc | gctccagca | GGGGACTAAAAC | | |
| | | | tccagca | | | | |
| 11b | zika_72 | LwaCas13a | GATTTAGACTACCCCAAAA | catccatctc | GATTTAGACTAC | Zika | 1b |
| | | | ACGAAGGGGACTAAAACca | agcctccag | CCCAAAAACGAA | ssRNA | |
| | | | tccatctcagcctccagag | agctccagc | GGGGACTAAAAC | | |
| | | | ctccagc | | | | |
| 11b | zika_73 | LwaCas13a | GATTTAGACTACCCCAAAA | ccatccatct | GATTTAGACTAC | Zika | 1b |
| | | | ACGAAGGGGACTAAAACcc | cagcctcca | CCCAAAAACGAA | ssRNA | |
| | | | atccatctcagcctccaga | gagctccag | GGGGACTAAAAC | | |
| | | | gctccag | | | | |
| 11b | zika_74 | LwaCas13a | GATTTAGACTACCCCAAAA | accatccatc | GATTTAGACTAC | Zika | 1b |
| | | | ACGAAGGGGACTAAAACac | tcagcctcca | CCCAAAAACGAA | ssRNA | |
| | | | catccatctcagcctccag | gagctcca | GGGGACTAAAAC | | |
| | | | agctcca | | | | |
| 11b | zika_75 | LwaCas13a | GATTTAGACTACCCCAAAA | caccatccat | GATTTAGACTAC | Zika | 1b |
| | | | ACGAAGGGGACTAAAACca | ctcagcctcc | CCCAAAAACGAA | ssRNA | |
| | | | ccatccatctcagcctcca | agagctcc | GGGGACTAAAAC | | |
| | | | gagctcc | | | | |
| 11b | zika_76 | LwaCas13a | GATTTAGACTACCCCAAAA | gcaccatcc | GATTTAGACTAC | Zika | 1b |
| | | | ACGAAGGGGACTAAAACgc | atctcagcct | CCCAAAAACGAA | ssRNA | |
| | | | accatccatctcagcctcc | ccagagctc | GGGGACTAAAAC | | |
| | | | agagctc | | | | |
| 11b | zika_77 | LwaCas13a | GATTTAGACTACCCCAAAA | tgcaccatcc | GATTTAGACTAC | Zika | 1b |
| | | | ACGAAGGGGACTAAAACtg | atctcagcct | CCCAAAAACGAA | ssRNA | |
| | | | caccatccatctcagcctc | ccagagct | GGGGACTAAAAC | | |
| | | | cagagct | | | | |
| 11b | zika_78 | LwaCas13a | GATTTAGACTACCCCAAAA | ttgcaccatc | GATTTAGACTAC | Zika | 1b |
| | | | ACGAAGGGGACTAAAACtt | catctcagcc | CCCAAAAACGAA | ssRNA | |
| | | | gcaccatccatctcagcct | tccagagc | GGGGACTAAAAC | | |
| | | | ccagagc | | | | |
| 11b | zika_79 | LwaCas13a | GATTTAGACTACCCCAAAA | tttgcaccat | GATTTAGACTAC | Zika | 1b |
| | | | ACGAAGGGGACTAAAACtt | ccatctcagc | CCCAAAAACGAA | ssRNA | |
| | | | tgcaccatccatctcagcc | ctccagag | GGGGACTAAAAC | | |
| | | | tccagag | | | | |
| 11b | zika_80 | LwaCas13a | GATTTAGACTACCCCAAAA | ctttgcacca | GATTTAGACTAC | Zika | 1b |
| | | | ACGAAGGGGACTAAAACct | tccatctcag | CCCAAAAACGAA | ssRNA | |
| | | | ttgcaccatccatctcagc | cctccaga | GGGGACTAAAAC | | |
| | | | ctccaga | | | | |
| 11b | zika_81 | LwaCas13a | GATTTAGACTACCCCAAAA | cctttgcacc | GATTTAGACTAC | Zika | 1b |
| | | | ACGAAGGGGACTAAAACcc | atccatctca | CCCAAAAACGAA | ssRNA | |
| | | | tttgcaccatccatctcag | gcctccag | GGGGACTAAAAC | | |
| | | | cctccag | | | | |
| 11b | zika_82 | LwaCas13a | GATTTAGACTACCCCAAAA | ccctttgcac | GATTTAGACTAC | Zika | 1b |
| | | | ACGAAGGGGACTAAAACcc | catccatctc | CCCAAAAACGAA | ssRNA | |
| | | | ctttgcaccatccatctca | agcctcca | GGGGACTAAAAC | | |
| | | | gcctcca | | | | |
| 11b | zika_83 | LwaCas13a | GATTTAGACTACCCCAAAA | tccctttgca | GATTTAGACTAC | Zika | 1b |
| | | | ACGAAGGGGACTAAAACtc | ccatccatct | CCCAAAAACGAA | ssRNA | |
| | | | cctttgcaccatccatctc | cagcctcc | GGGGACTAAAAC | | |
| | | | agcctcc | | | | |
| 11b | zika_84 | LwaCas13a | GATTTAGACTACCCCAAAA | ttccctttgca | GATTTAGACTAC | Zika | 1b |
| | | | ACGAAGGGGACTAAAACtt | ccatccatct | CCCAAAAACGAA | ssRNA | |
| | | | ccctttgcaccatccatct | cagcctc | GGGGACTAAAAC | | |
| | | | cagcctc | | | | |
| 11b | zika_85 | LwaCas13a | GATTTAGACTACCCCAAAA | cttccctttgc | GATTTAGACTAC | Zika | 1b |
| | | | ACGAAGGGGACTAAAACct | accatccatc | CCCAAAAACGAA | ssRNA | |
| | | | tccctttgcaccatccatc | tcagcct | GGGGACTAAAAC | | |
| | | | tcagcct | | | | |
| 11b | zika_86 | LwaCas13a | GATTTAGACTACCCCAAAA | ccttccctttg | GATTTAGACTAC | Zika | 1b |
| | | | ACGAAGGGGACTAAAACcc | caccatccat | CCCAAAAACGAA | ssRNA | |
| | | | ttccctttgcaccatccat | ctcagcc | GGGGACTAAAAC | | |
| | | | ctcagcc | | | | |
| 11b | zika_87 | LwaCas13a | GATTTAGACTACCCCAAAA | gccttcccttt | GATTTAGACTAC | Zika | 1b |
| | | | ACGAAGGGGACTAAAACgc | gcaccatcc | CCCAAAAACGAA | ssRNA | |
| | | | cttccctttgcaccatcca | atctcagc | GGGGACTAAAAC | | |
| | | | tctcagc | | | | |
| 11b | zika_88 | LwaCas13a | GATTTAGACTACCCCAAAA | agccttccct | GATTTAGACTAC | Zika | 1b |
| | | | ACGAAGGGGACTAAAACag | ttgcaccatc | CCCAAAAACGAA | ssRNA | |
| | | | ccttccctttgcaccatcc | catctcag | GGGGACTAAAAC | | |
| | | | atctcag | | | | |
| 11b | zika_89 | LwaCas13a | GATTTAGACTACCCCAAAA | cagccttccc | GATTTAGACTAC | Zika | 1b |
| | | | ACGAAGGGGACTAAAACca | tttgcaccat | CCCAAAAACGAA | ssRNA | |
| | | | gccttccctttgcaccatc | ccatctca | GGGGACTAAAAC | | |
| | | | catctca | | | | |
| 11b | zika_90 | LwaCas13a | GATTTAGACTACCCCAAAA | acagccttcc | GATTTAGACTAC | Zika | 1b |
| | | | ACGAAGGGGACTAAAACac | ctttgcacca | CCCAAAAACGAA | ssRNA | |
| | | | agccttccctttgcaccat | tccatctc | GGGGACTAAAAC | | |
| | | | ccatctc | | | | |
| 11b | zika_91 | LwaCas13a | GATTTAGACTACCCCAAAA | gacagccttc | GATTTAGACTAC | Zika | 1b |
| | | | ACGAAGGGGACTAAAACga | cctttgcacc | CCCAAAAACGAA | ssRNA | |
| | | | cagccttccctttgcacca | atccatct | GGGGACTAAAAC | | |
| | | | tccatct | | | | |
| 11b | zika_92 | LwaCas13a | GATTTAGACTACCCCAAAA | ggacagcct | GATTTAGACTAC | Zika | 1b |
| | | | ACGAAGGGGACTAAAACgg | tccctttgca | CCCAAAAACGAA | ssRNA | |
| | | | acagccttccctttgcacc | ccatccatc | GGGGACTAAAAC | | |
| | | | atccatc | | | | |
| 11b | zika_93 | LwaCas13a | GATTTAGACTACCCCAAAA | aggacagcc | GATTTAGACTAC | Zika | 1b |
| | | | ACGAAGGGGACTAAAACag | ttccctttgca | CCCAAAAACGAA | ssRNA | |
| | | | gacagccttccctttgcac | ccatccat | GGGGACTAAAAC | | |
| | | | catccat | | | | |
| 11b | zika_94 | LwaCas13a | GATTTAGACTACCCCAAAA | gaggacagc | GATTTAGACTAC | Zika | 1b |
| | | | ACGAAGGGGACTAAAACga | cttccctttgc | CCCAAAAACGAA | ssRNA | |
| | | | ggacagccttccctttgca | accatcca | GGGGACTAAAAC | | |
| | | | ccatcca | | | | |
| 11b | zika_0 | CcaCas13b | tttgttgttccagtgtgga | tttgttgttcc | GTTGGAACTGCT | Zika | 1b |
| | | | gttccggtgtcGT | agtgtggagt | CTCATTTTGGAGG | ssRNA | |
| | | | TGGAACTGCTCTCATTTTG | tccggtgtc | GTAATCACAAC | | |
| | | | GAGGGTAATCACAAC | | | | |
| 11b | zika_1 | CcaCas13b | ctttgttgttccagtgtgg | ctttgttgttc | GTTGGAACTGCT | Zika | 1b |
| | | | agttccggtgtGT | cagtgtgga | CTCATTTTGGAGG | ssRNA | |
| | | | TGGAACTGCTCTCATTTTG | gttccggtgt | GTAATCACAAC | | |
| | | | GAGGGTAATCACAAC | | | | |
| 11b | zika_2 | CcaCas13b | tctttgttgttccagtgtg | tctttgttgttc | GTTGGAACTGCT | Zika | 1b |
| | | | gagttccggtgGT | cagtgtgga | CTCATTTTGGAGG | ssRNA | |
| | | | TGGAACTGCTCTCATTTTG | gttccggtg | GTAATCACAAC | | |
| | | | GAGGGTAATCACAAC | | | | |
| 11b | zika_3 | CcaCas13b | ttctttgttgttccagtgt | ttctttgttgtt | GTTGGAACTGCT | Zika | 1b |
| | | | ggagttccggtGT | ccagtgtgg | CTCATTTTGGAGG | ssRNA | |
| | | | TGGAACTGCTCTCATTTTG | agttccggt | GTAATCACAAC | | |
| | | | GAGGGTAATCACAAC | | | | |
| 11b | zika_4 | CcaCas13b | cttctttgttgttccagtg | cttctttgttgt | GTTGGAACTGCT | Zika | 1b |
| | | | tggagttccggGT | tccagtgtgg | CTCATTTTGGAGG | ssRNA | |
| | | | TGGAACTGCTCTCATTTTG | agttccgg | GTAATCACAAC | | |
| | | | GAGGGTAATCACAAC | | | | |
| 11b | zika_5 | CcaCas13b | gcttctttgttgttccagt | gcttctttgtt | GTTGGAACTGCT | Zika | 1b |
| | | | gtggagttccgGT | gttccagtgt | CTCATTTTGGAGG | ssRNA | |
| | | | TGGAACTGCTCTCATTTTG | ggagttccg | GTAATCACAAC | | |
| | | | GAGGGTAATCACAAC | | | | |
| 11b | zika_6 | CcaCas13b | tgcttctttgttgttccag | tgcttctttgtt | GTTGGAACTGCT | Zika | 1b |
| | | | tgtggagttccGT | gttccagtgt | CTCATTTTGGAGG | ssRNA | |
| | | | TGGAACTGCTCTCATTTTG | ggagttcc | GTAATCACAAC | | |
| | | | GAGGGTAATCACAAC | | | | |
| 11b | zika_7 | CcaCas13b | gtgcttctttgttgttcca | gtgcttctttg | GTTGGAACTGCT | Zika | 1b |
| | | | gtgtggagttcGT | ttgttccagtg | CTCATTTTGGAGG | ssRNA | |
| | | | TGGAACTGCTCTCATTTTG | tggagttc | GTAATCACAAC | | |
| | | | GAGGGTAATCACAAC | | | | |
| 11b | zika_8 | CcaCas13b | agtgcttctttgttgttcc | agtgcttcttt | GTTGGAACTGCT | Zika | 1b |
| | | | agtgtggagttGT | gttgttccagt | CTCATTTTGGAGG | ssRNA | |
| | | | TGGAACTGCTCTCATTTTG | gtggagtt | GTAATCACAAC | | |
| | | | GAGGGTAATCACAAC | | | | |
| 11b | zika_9 | CcaCas13b | cagtgcttctttgttgttc | cagtgcttctt | GTTGGAACTGCT | Zika | 1b |
| | | | cagtgtggagtGT | tgttgttccag | CTCATTTTGGAGG | ssRNA | |
| | | | TGGAACTGCTCTCATTTTG | tgtggagt | GTAATCACAAC | | |
| | | | GAGGGTAATCACAAC | | | | |
| 11b | zika_10 | CcaCas13b | ccagtgcttctttgttgtt | ccagtgcttc | GTTGGAACTGCT | Zika | 1b |
| | | | ccagtgtggagGT | tttgttgttcc | CTCATTTTGGAGG | ssRNA | |
| | | | TGGAACTGCTCTCATTTTG | agtgtggag | GTAATCACAAC | | |
| | | | GAGGGTAATCACAAC | | | | |
| 11b | zika_11 | CcaCas13b | accagtgcttctttgttgt | accagtgctt | GTTGGAACTGCT | Zika | 1b |
| | | | tccagtgtggaGT | ctttgttgttc | CTCATTTTGGAGG | ssRNA | |
| | | | TGGAACTGCTCTCATTTTG | cagtgtgga | GTAATCACAAC | | |
| | | | GAGGGTAATCACAAC | | | | |
| 11b | zika_12 | CcaCas13b | taccagtgcttctttgttg | taccagtgct | GTTGGAACTGCT | Zika | 1b |
| | | | ttccagtgtggGT | tctttgttgttc | CTCATTTTGGAGG | ssRNA | |
| | | | TGGAACTGCTCTCATTTTG | cagtgtgg | GTAATCACAAC | | |
| | | | GAGGGTAATCACAAC | | | | |
| 11b | zika_13 | CcaCas13b | ctaccagtgcttctttgtt | ctaccagtgc | GTTGGAACTGCT | Zika | 1b |
| | | | gttccagtgtgGT | ttctttgttgtt | CTCATTTTGGAGG | ssRNA | |
| | | | TGGAACTGCTCTCATTTTG | ccagtgtg | GTAATCACAAC | | |
| | | | GAGGGTAATCACAAC | | | | |
| 11b | zika_14 | CcaCas13b | tctaccagtgcttctttgt | tctaccagtg | GTTGGAACTGCT | Zika | 1b |
| | | | tgttccagtgtGT | cttctttgttgt | CTCATTTTGGAGG | ssRNA | |
| | | | TGGAACTGCTCTCATTTTG | tccagtgt | GTAATCACAAC | | |
| | | | GAGGGTAATCACAAC | | | | |
| 11b | zika_15 | CcaCas13b | ctctaccagtgcttctttg | ctctaccagt | GTTGGAACTGCT | Zika | 1b |
| | | | ttgttccagtgGT | gcttctttgtt | CTCATTTTGGAGG | ssRNA | |
| | | | TGGAACTGCTCTCATTTTG | gttccagtg | GTAATCACAAC | | |
| | | | GAGGGTAATCACAAC | | | | |
| 11b | zika_16 | CcaCas13b | actctaccagtgcttcttt | actctaccag | GTTGGAACTGCT | Zika | 1b |
| | | | gttgttccagtGT | tgcttctttgtt | CTCATTTTGGAGG | ssRNA | |
| | | | TGGAACTGCTCTCATTTTG | gttccagt | GTAATCACAAC | | |
| | | | GAGGGTAATCACAAC | | | | |
| 11b | zika_17 | CcaCas13b | aactctaccagtgcttctt | aactctacca | GTTGGAACTGCT | Zika | 1b |
| | | | tgttgttccagGT | gtgcttctttg | CTCATTTTGGAGG | ssRNA | |
| | | | TGGAACTGCTCTCATTTTG | ttgttccag | GTAATCACAAC | | |
| | | | GAGGGTAATCACAAC | | | | |
| 11b | zika_18 | CcaCas13b | gaactctaccagtgcttct | gaactctacc | GTTGGAACTGCT | Zika | 1b |
| | | | ttgttgttccaGT | agtgcttcttt | CTCATTTTGGAGG | ssRNA | |
| | | | TGGAACTGCTCTCATTTTG | gttgttcca | GTAATCACAAC | | |
| | | | GAGGGTAATCACAAC | | | | |
| 11b | zika_19 | CcaCas13b | tgaactctaccagtgcttc | tgaactctac | GTTGGAACTGCT | Zika | 1b |
| | | | tttgttgttccGT | cagtgcttctt | CTCATTTTGGAGG | ssRNA | |
| | | | TGGAACTGCTCTCATTTTG | tgttgttcc | GTAATCACAAC | | |
| | | | GAGGGTAATCACAAC | | | | |
| 11b | zika_20 | CcaCas13b | cttgaactctaccagtgct | cttgaactct | GTTGGAACTGCT | Zika | 1b |
| | | | tctttgttgttGTT | accagtgctt | CTCATTTTGGAGG | ssRNA | |
| | | | GGAACTGCTCTCATTTTGG | ctttgttgtt | GTAATCACAAC | | |
| | | | AGGGTAATCACAAC | | | | |
| 11b | zika_21 | CcaCas13b | tccttgaactctaccagtg | tccttgaact | GTTGGAACTGCT | Zika | 1b |
| | | | cttctttgttgGT | ctaccagtgc | CTCATTTTGGAGG | ssRNA | |
| | | | TGGAACTGCTCTCATTTTG | ttctttgttg | GTAATCACAAC | | |
| | | | GAGGGTAATCACAAC | | | | |
| 11b | zika_22 | CcaCas13b | cgtccttgaactctaccag | cgtccttgaa | GTTGGAACTGCT | Zika | 1b |
| | | | tgcttctttgtGT | ctctaccagt | CTCATTTTGGAGG | ssRNA | |
| | | | TGGAACTGCTCTCATTTTG | gcttctttgt | GTAATCACAAC | | |
| | | | GAGGGTAATCACAAC | | | | |
| 11b | zika_23 | CcaCas13b | tgcgtccttgaactctacc | tgcgtccttg | GTTGGAACTGCT | Zika | 1b |
| | | | agtgcttctttGT | aactctacca | CTCATTTTGGAGG | ssRNA | |
| | | | TGGAACTGCTCTCATTTTG | gtgcttcttt | GTAATCACAAC | | |
| | | | GAGGGTAATCACAAC | | | | |
| 11b | zika_24 | CcaCas13b | tgtgcgtccttgaactcta | tgtgcgtcctt | GTTGGAACTGCT | Zika | 1b |
| | | | ccagtgcttctGT | gaactctacc | CTCATTTTGGAGG | ssRNA | |
| | | | TGGAACTGCTCTCATTTTG | agtgcttct | GTAATCACAAC | | |
| | | | GAGGGTAATCACAAC | | | | |
| 11b | zika_25 | CcaCas13b | catgtgcgtccttgaactc | catgtgcgtc | GTTGGAACTGCT | Zika | 1b |
| | | | taccagtgcttGT | cttgaactct | CTCATTTTGGAGG | ssRNA | |
| | | | TGGAACTGCTCTCATTTTG | accagtgctt | GTAATCACAAC | | |
| | | | GAGGGTAATCACAAC | | | | |
| 11b | zika_26 | CcaCas13b | ggcatgtgcgtccttgaac | ggcatgtgc | GTTGGAACTGCT | Zika | 1b |
| | | | tctaccagtgcGT | gtccttgaac | CTCATTTTGGAGG | ssRNA | |
| | | | TGGAACTGCTCTCATTTTG | tctaccagtg | GTAATCACAAC | | |
| | | | GAGGGTAATCACAAC | c | | | |
| 11b | zika_27 | CcaCas13b | ttggcatgtgcgtccttga | ttggcatgtg | GTTGGAACTGCT | Zika | 1b |
| | | | actctaccagtGT | cgtccttgaa | CTCATTTTGGAGG | ssRNA | |
| | | | TGGAACTGCTCTCATTTTG | ctctaccagt | GTAATCACAAC | | |
| | | | GAGGGTAATCACAAC | | | | |
| 11b | zika_28 | CcaCas13b | ttttggcatgtgcgtcctt | ttttggcatgt | GTTGGAACTGCT | Zika | 1b |
| | | | gaactctaccaGT | gcgtccttga | CTCATTTTGGAGG | ssRNA | |
| | | | TGGAACTGCTCTCATTTTG | actctacca | GTAATCACAAC | | |
| | | | GAGGGTAATCACAAC | | | | |
| 11b | zika_29 | CcaCas13b | ccttttggcatgtgcgtcc | ccttttggcat | GTTGGAACTGCT | Zika | 1b |
| | | | ttgaactctacGT | gtgcgtcctt | CTCATTTTGGAGG | ssRNA | |
| | | | TGGAACTGCTCTCATTTTG | gaactctac | GTAATCACAAC | | |
| | | | GAGGGTAATCACAAC | | | | |
| 11b | zika_30 | CcaCas13b | tgccttttggcatgtgcgt | tgccttttggc | GTTGGAACTGCT | Zika | 1b |
| | | | ccttgaactctGT | atgtgcgtcc | CTCATTTTGGAGG | ssRNA | |
| | | | TGGAACTGCTCTCATTTTG | ttgaactct | GTAATCACAAC | | |
| | | | GAGGGTAATCACAAC | | | | |
| 11b | zika_31 | CcaCas13b | tttgccttttggcatgtgc | tttgccttttg | GTTGGAACTGCT | Zika | 1b |
| | | | gtccttgaactGT | gcatgtgcgt | CTCATTTTGGAGG | ssRNA | |
| | | | TGGAACTGCTCTCATTTTG | ccttgaact | GTAATCACAAC | | |
| | | | GAGGGTAATCACAAC | | | | |
| 11b | zika_32 | CcaCas13b | agtttgccttttggcatgt | agtttgccttt | GTTGGAACTGCT | Zika | 1b |
| | | | gcgtccttgaaGT | tggcatgtgc | CTCATTTTGGAGG | ssRNA | |
| | | | TGGAACTGCTCTCATTTTG | gtccttgaa | GTAATCACAAC | | |
| | | | GAGGGTAATCACAAC | | | | |
| 11b | zika_33 | CcaCas13b | acagtttgccttttggcat | acagtttgcc | GTTGGAACTGCT | Zika | 1b |
| | | | gtgcgtccttgGT | ttttggcatgt | CTCATTTTGGAGG | ssRNA | |
| | | | TGGAACTGCTCTCATTTTG | gcgtccttg | GTAATCACAAC | | |
| | | | GAGGGTAATCACAAC | | | | |
| 11b | zika_34 | CcaCas13b | cgacagtttgccttttggc | cgacagtttg | GTTGGAACTGCT | Zika | 1b |
| | | | atgtgcgtcctGT | ccttttggcat | CTCATTTTGGAGG | ssRNA | |
| | | | TGGAACTGCTCTCATTTTG | gtgcgtcct | GTAATCACAAC | | |
| | | | GAGGGTAATCACAAC | | | | |
| 11b | zika_35 | CcaCas13b | cacgacagtttgccttttg | cacgacagtt | GTTGGAACTGCT | Zika | 1b |
| | | | gcatgtgcgtcGT | tgccttttggc | CTCATTTTGGAGG | ssRNA | |
| | | | TGGAACTGCTCTCATTTTG | atgtgcgtc | GTAATCACAAC | | |
| | | | GAGGGTAATCACAAC | | | | |
| 11b | zika_36 | CcaCas13b | accacgacagtttgccttt | accacgaca | GTTGGAACTGCT | Zika | 1b |
| | | | tggcatgtgcgGT | gtttgcctttt | CTCATTTTGGAGG | ssRNA | |
| | | | TGGAACTGCTCTCATTTTG | ggcatgtgc | GTAATCACAAC | | |
| | | | GAGGGTAATCACAAC | g | | | |
| 11b | zika_37 | CcaCas13b | gaaccacgacagtttgcct | gaaccacga | GTTGGAACTGCT | Zika | 1b |
| | | | tttggcatgtgGT | cagtttgcctt | CTCATTTTGGAGG | ssRNA | |
| | | | TGGAACTGCTCTCATTTTG | ttggcatgtg | GTAATCACAAC | | |
| | | | GAGGGTAATCACAAC | | | | |
| 11b | zika_38 | CcaCas13b | tagaaccacgacagtttgc | tagaaccac | GTTGGAACTGCT | Zika | 1b |
| | | | cttttggcatgGT | gacagtttgc | CTCATTTTGGAGG | ssRNA | |
| | | | TGGAACTGCTCTCATTTTG | cttttggcatg | GTAATCACAAC | | |
| | | | GAGGGTAATCACAAC | | | | |
| 11b | zika_39 | CcaCas13b | cctagaaccacgacagttt | cctagaacc | GTTGGAACTGCT | Zika | 1b |
| | | | gccttttggcaGT | acgacagttt | CTCATTTTGGAGG | ssRNA | |
| | | | TGGAACTGCTCTCATTTTG | gccttttggc | GTAATCACAAC | | |
| | | | GAGGGTAATCACAAC | a | | | |
| 11b | zika_40 | CcaCas13b | tccctagaaccacgacagt | tccctagaac | GTTGGAACTGCT | Zika | 1b |
| | | | ttgccttttggGT | cacgacagtt | CTCATTTTGGAGG | ssRNA | |
| | | | TGGAACTGCTCTCATTTTG | tgccttttgg | GTAATCACAAC | | |
| | | | GAGGGTAATCACAAC | | | | |
| 11b | zika_41 | CcaCas13b | actccctagaaccacgaca | actccctaga | GTTGGAACTGCT | Zika | 1b |
| | | | gtttgccttttGT | accacgaca | CTCATTTTGGAGG | ssRNA | |
| | | | TGGAACTGCTCTCATTTTG | gtttgcctttt | GTAATCACAAC | | |
| | | | GAGGGTAATCACAAC | | | | |
| 11b | zika_42 | CcaCas13b | tgactccctagaaccacga | tgactcccta | GTTGGAACTGCT | Zika | 1b |
| | | | cagtttgccttGT | gaaccacga | CTCATTTTGGAGG | ssRNA | |
| | | | TGGAACTGCTCTCATTTTG | cagtttgcctt | GTAATCACAAC | | |
| | | | GAGGGTAATCACAAC | | | | |
| 11b | zika_43 | CcaCas13b | cttgactccctagaaccac | cttgactccc | GTTGGAACTGCT | Zika | 1b |
| | | | gacagtttgccGT | tagaaccac | CTCATTTTGGAGG | ssRNA | |
| | | | TGGAACTGCTCTCATTTTG | gacagtttgc | GTAATCACAAC | | |
| | | | GAGGGTAATCACAAC | c | | | |
| 11b | zika_44 | CcaCas13b | ttcttgactccctagaacc | ttcttgactcc | GTTGGAACTGCT | Zika | 1b |
| | | | acgacagtttgGT | ctagaacca | CTCATTTTGGAGG | ssRNA | |
| | | | TGGAACTGCTCTCATTTTG | cgacagtttg | GTAATCACAAC | | |
| | | | GAGGGTAATCACAAC | | | | |
| 11b | zika_45 | CcaCas13b | ccttcttgactccctagaa | ccttcttgact | GTTGGAACTGCT | Zika | 1b |
| | | | ccacgacagttGT | ccctagaac | CTCATTTTGGAGG | ssRNA | |
| | | | TGGAACTGCTCTCATTTTG | cacgacagtt | GTAATCACAAC | | |
| | | | GAGGGTAATCACAAC | | | | |
| 11b | zika_46 | CcaCas13b | ctccttcttgactccctag | ctccttcttga | GTTGGAACTGCT | Zika | 1b |
| | | | aaccacgacagGT | ctccctagaa | CTCATTTTGGAGG | ssRNA | |
| | | | TGGAACTGCTCTCATTTTG | ccacgacag | GTAATCACAAC | | |
| | | | GAGGGTAATCACAAC | | | | |
| 11b | zika_47 | CcaCas13b | tgctccttcttgactccct | tgctccttctt | GTTGGAACTGCT | Zika | 1b |
| | | | agaaccacgacGT | gactccctag | CTCATTTTGGAGG | ssRNA | |
| | | | TGGAACTGCTCTCATTTTG | aaccacgac | GTAATCACAAC | | |
| | | | GAGGGTAATCACAAC | | | | |
| 11b | zika_48 | CcaCas13b | actgctccttcttgactcc | actgctcctt | GTTGGAACTGCT | Zika | 1b |
| | | | ctagaaccacgGT | cttgactccc | CTCATTTTGGAGG | ssRNA | |
| | | | TGGAACTGCTCTCATTTTG | tagaaccac | GTAATCACAAC | | |
| | | | GAGGGTAATCACAAC | g | | | |
| 11b | zika_49 | CcaCas13b | gaactgctccttcttgact | gaactgctcc | GTTGGAACTGCT | Zika | 1b |
| | | | ccctagaaccaGT | ttcttgactcc | CTCATTTTGGAGG | ssRNA | |
| | | | TGGAACTGCTCTCATTTTG | ctagaacca | GTAATCACAAC | | |
| | | | GAGGGTAATCACAAC | | | | |
| 11b | zika_50 | CcaCas13b | gtgaactgctccttcttga | gtgaactgct | GTTGGAACTGCT | Zika | 1b |
| | | | ctccctagaacGT | ccttcttgact | CTCATTTTGGAGG | ssRNA | |
| | | | TGGAACTGCTCTCATTTTG | ccctagaac | GTAATCACAAC | | |
| | | | GAGGGTAATCACAAC | | | | |
| 11b | zika_51 | CcaCas13b | gtgtgaactgctccttctt | gtgtgaactg | GTTGGAACTGCT | Zika | 1b |
| | | | gactccctagaGT | ctccttcttga | CTCATTTTGGAGG | ssRNA | |
| | | | TGGAACTGCTCTCATTTTG | ctccctaga | GTAATCACAAC | | |
| | | | GAGGGTAATCACAAC | | | | |
| 11b | zika_52 | CcaCas13b | ccgtgtgaactgctccttc | ccgtgtgaa | GTTGGAACTGCT | Zika | 1b |
| | | | ttgactccctaGT | ctgctccttct | CTCATTTTGGAGG | ssRNA | |
| | | | TGGAACTGCTCTCATTTTG | tgactcccta | GTAATCACAAC | | |
| | | | GAGGGTAATCACAAC | | | | |
| 11b | zika_53 | CcaCas13b | ggccgtgtgaactgctcct | ggccgtgtg | GTTGGAACTGCT | Zika | 1b |
| | | | tcttgactcccGT | aactgctcct | CTCATTTTGGAGG | ssRNA | |
| | | | TGGAACTGCTCTCATTTTG | tcttgactcc | GTAATCACAAC | | |
| | | | GAGGGTAATCACAAC | c | | | |
| 11b | zika_54 | CcaCas13b | agggccgtgtgaactgctc | agggccgtg | GTTGGAACTGCT | Zika | 1b |
| | | | cttcttgactcGT | tgaactgctc | CTCATTTTGGAGG | ssRNA | |
| | | | TGGAACTGCTCTCATTTTG | cttcttgactc | GTAATCACAAC | | |
| | | | GAGGGTAATCACAAC | | | | |
| 11b | zika_55 | CcaCas13b | caagggccgtgtgaactgc | caagggccg | GTTGGAACTGCT | Zika | 1b |
| | | | tccttcttgacGT | tgtgaactgc | CTCATTTTGGAGG | ssRNA | |
| | | | TGGAACTGCTCTCATTTTG | tccttcttgac | GAGGGTAATCACAAC | | |
| | | | GTAATCACAAC | | | | |
| 11b | zika_56 | CcaCas13b | agcaagggccgtgtgaact | agcaagggc | GTTGGAACTGCT | Zika | 1b |
| | | | gctccttcttgGT | cgtgtgaact | CTCATTTTGGAGG | ssRNA | |
| | | | TGGAACTGCTCTCATTTTG | gctccttcttg | GTAATCACAAC | | |
| | | | GAGGGTAATCACAAC | | | | |
| 11b | zika_57 | CcaCas13b | ccagcaagggccgtgtgaa | ccagcaagg | GTTGGAACTGCT | Zika | 1b |
| | | | ctgctccttctG | gccgtgtga | CTCATTTTGGAGG | ssRNA | |
| | | | TTGGAACTGCTCTCATTTT | actgctcctt | GTAATCACAAC | | |
| | | | GGAGGGTAATCACAAC | ct | | | |
| 11b | zika_58 | CcaCas13b | ctccagcaagggccgtgtg | ctccagcaa | GTTGGAACTGCT | Zika | 1b |
| | | | aactgctccttG | gggccgtgt | CTCATTTTGGAGG | ssRNA | |
| | | | TTGGAACTGCTCTCATTTT | gaactgctcc | GTAATCACAAC | | |
| | | | GGAGGGTAATCACAAC | tt | | | |
| 11b | zika_59 | CcaCas13b | agctccagcaagggccgtg | agctccagc | GTTGGAACTGCT | Zika | 1b |
| | | | tgaactgctccG | aagggccgt | CTCATTTTGGAGG | ssRNA | |
| | | | TTGGAACTGCTCTCATTTT | gtgaactgct | GTAATCACAAC | | |
| | | | GGAGGGTAATCACAAC | cc | | | |
| 11b | zika_60 | CcaCas13b | agagctccagcaagggccg | agagctcca | GTTGGAACTGCT | Zika | 1b |
| | | | tgtgaactgctG | gcaagggcc | CTCATTTTGGAGG | ssRNA | |
| | | | TTGGAACTGCTCTCATTTT | gtgtgaactg | GTAATCACAAC | | |
| | | | GGAGGGTAATCACAAC | ct | | | |
| 11b | zika_61 | CcaCas13b | ccagagctccagcaagggc | ccagagctc | GTTGGAACTGCT | Zika | 1b |
| | | | cgtgtgaactgG | cagcaaggg | CTCATTTTGGAGG | ssRNA | |
| | | | TTGGAACTGCTCTCATTTT | ccgtgtgaa | GTAATCACAAC | | |
| | | | GGAGGGTAATCACAAC | ctg | | | |
| 11b | zika_62 | CcaCas13b | ctccagagctccagcaagg | ctccagagct | GTTGGAACTGCT | Zika | 1b |
| | | | gccgtgtgaacG | ccagcaagg | CTCATTTTGGAGG | ssRNA | |
| | | | TTGGAACTGCTCTCATTTT | gccgtgtga | GTAATCACAAC | | |
| | | | GGAGGGTAATCACAAC | ac | | | |
| 11b | zika_63 | CcaCas13b | gcctccagagctccagcaa | gcctccaga | GTTGGAACTGCT | Zika | 1b |
| | | | gggccgtgtgaG | gctccagca | CTCATTTTGGAGG | ssRNA | |
| | | | TTGGAACTGCTCTCATTTT | agggccgtg | GTAATCACAAC | | |
| | | | GGAGGGTAATCACAAC | tga | | | |
| 11b | zika_64 | CcaCas13b | cagcctccagagctccagc | cagcctcca | GTTGGAACTGCT | Zika | 1b |
| | | | aagggccgtgt | gagctccag | CTCATTTTGGAGG | ssRNA | |
| | | | GTTGGAACTGCTCTCATTT | caagggccg | GTAATCACAAC | | |
| | | | TGGAGGGTAATCACAAC | tgt | | | |
| 11b | zika_65 | CcaCas13b | ctcagcctccagagctcca | ctcagcctcc | GTTGGAACTGCT | Zika | 1b |
| | | | gcaagggccgt | agagctcca | CTCATTTTGGAGG | ssRNA | |
| | | | GTTGGAACTGCTCTCATTT | gcaagggcc | GTAATCACAAC | | |
| | | | TGGAGGGTAATCACAAC | gt | | | |
| 11b | zika_66 | CcaCas13b | atctcagcctccagagctc | atctcagcct | GTTGGAACTGCT | Zika | 1b |
| | | | cagcaagggcc | ccagagctc | CTCATTTTGGAGG | ssRNA | |
| | | | GTTGGAACTGCTCTCATTT | cagcaaggg | GTAATCACAAC | | |
| | | | TGGAGGGTAATCACAAC | cc | | | |
| 11b | zika_67 | CcaCas13b | ccatctcagcctccagagc | ccatctcagc | GTTGGAACTGCT | Zika | 1b |
| | | | tccagcaaggg | ctccagagct | CTCATTTTGGAGG | ssRNA | |
| | | | GTTGGAACTGCTCTCATTT | ccagcaagg | GTAATCACAAC | | |
| | | | TGGAGGGTAATCACAAC | g | | | |
| 11b | zika_68 | CcaCas13b | tccatctcagcctccagag | tccatctcag | GTTGGAACTGCT | Zika | 1b |
| | | | ctccagcaagg | cctccagag | CTCATTTTGGAGG | ssRNA | |
| | | | GTTGGAACTGCTCTCATTT | ctccagcaa | GTAATCACAAC | | |
| | | | TGGAGGGTAATCACAAC | gg | | | |
| 11b | zika_69 | CcaCas13b | atccatctcagcctccaga | atccatctca | GTTGGAACTGCT | Zika | 1b |
| | | | gctccagcaag | gcctccaga | CTCATTTTGGAGG | ssRNA | |
| | | | GTTGGAACTGCTCTCATTT | gctccagca | GTAATCACAAC | | |
| | | | TGGAGGGTAATCACAAC | ag | | | |
| 11b | zika_70 | CcaCas13b | catccatctcagcctccag | catccatctc | GTTGGAACTGCT | Zika | 1b |
| | | | agctccagcaa | agcctccag | CTCATTTTGGAGG | ssRNA | |
| | | | GTTGGAACTGCTCTCATTT | agctccagc | GTAATCACAAC | | |
| | | | TGGAGGGTAATCACAAC | aa | | | |
| 11b | zika_71 | CcaCas13b | ccatccatctcagcctcca | ccatccatct | GTTGGAACTGCT | Zika | 1b |
| | | | gagctccagca | cagcctcca | CTCATTTTGGAGG | ssRNA | |
| | | | GTTGGAACTGCTCTCATTT | gagctccag | GTAATCACAAC | | |
| | | | TGGAGGGTAATCACAAC | ca | | | |
| 11b | zika_72 | CcaCas13b | accatccatctcagcctcc | accatccatc | GTTGGAACTGCT | Zika | 1b |
| | | | agagctccagc | tcagcctcca | CTCATTTTGGAGG | ssRNA | |
| | | | GTTGGAACTGCTCTCATTT | gagctccag | GTAATCACAAC | | |
| | | | TGGAGGGTAATCACAAC | c | | | |
| 11b | zika_73 | CcaCas13b | caccatccatctcagcctc | caccatccat | GTTGGAACTGCT | Zika | 1b |
| | | | cagagctccag | ctcagcctcc | CTCATTTTGGAGG | ssRNA | |
| | | | GTTGGAACTGCTCTCATTT | agagctcca | GTAATCACAAC | | |
| | | | TGGAGGGTAATCACAAC | g | | | |
| 11b | zika_74 | CcaCas13b | gcaccatccatctcagcct | gcaccatcc | GTTGGAACTGCT | Zika | 1b |
| | | | ccagagctcca | atctcagcct | CTCATTTTGGAGG | ssRNA | |
| | | | GTTGGAACTGCTCTCATTT | ccagagctc | GTAATCACAAC | | |
| | | | TGGAGGGTAATCACAAC | ca | | | |
| 11b | zika_75 | CcaCas13b | tgcaccatccatctcagcc | tgcaccatcc | GTTGGAACTGCT | Zika | 1b |
| | | | tccagagctcc | atctcagcct | CTCATTTTGGAGG | ssRNA | |
| | | | GTTGGAACTGCTCTCATTT | ccagagctc | GTAATCACAAC | | |
| | | | TGGAGGGTAATCACAAC | c | | | |
| 11b | zika_76 | CcaCas13b | ttgcaccatccatctcagc | ttgcaccatc | GTTGGAACTGCT | Zika | 1b |
| | | | ctccagagctcG | catctcagcc | CTCATTTTGGAGG | ssRNA | |
| | | | TTGGAACTGCTCTCATTTT | tccagagctc | GTAATCACAAC | | |
| | | | GGAGGGTAATCACAAC | | | | |
| 11b | zika_77 | CcaCas13b | tttgcaccatccatctcag | tttgcaccat | GTTGGAACTGCT | Zika | 1b |
| | | | cctccagagctG | ccatctcagc | CTCATTTTGGAGG | ssRNA | |
| | | | TTGGAACTGCTCTCATTTT | ctccagagct | GTAATCACAAC | | |
| | | | GGAGGGTAATCACAAC | | | | |
| 11b | zika_78 | CcaCas13b | ctttgcaccatccatctca | ctttgcacca | GTTGGAACTGCT | Zika | 1b |
| | | | gcctccagagcG | tccatctcag | CTCATTTTGGAGG | ssRNA | |
| | | | TTGGAACTGCTCTCATTTT | cctccagag | GTAATCACAAC | | |
| | | | GGAGGGTAATCACAAC | c | | | |
| 11b | zika_79 | CcaCas13b | cctttgcaccatccatctc | cctttgcacc | GTTGGAACTGCT | Zika | 1b |
| | | | agcctccagagG | atccatctca | CTCATTTTGGAGG | ssRNA | |
| | | | TTGGAACTGCTCTCATTTT | gcctccaga | GTAATCACAAC | | |
| | | | GGAGGGTAATCACAAC | g | | | |
| 11b | zika_80 | CcaCas13b | ccctttgcaccatccatct | ccctttgcac | GTTGGAACTGCT | Zika | 1b |
| | | | cagcctccagaG | catccatctc | CTCATTTTGGAGG | ssRNA | |
| | | | TTGGAACTGCTCTCATTTT | agcctccag | GTAATCACAAC | | |
| | | | GGAGGGTAATCACAAC | a | | | |
| 11b | zika_81 | CcaCas13b | tccctttgcaccatccatc | tccctttgca | GTTGGAACTGCT | Zika | 1b |
| | | | tcagcctccagG | ccatccatct | CTCATTTTGGAGG | ssRNA | |
| | | | TTGGAACTGCTCTCATTTT | cagcctcca | GTAATCACAAC | | |
| | | | GGAGGGTAATCACAAC | g | | | |
| 11b | zika_82 | CcaCas13b | ttccctttgcaccatccat | ttccctttgca | GTTGGAACTGCT | Zika | 1b |
| | | | ctcagcctccaG | ccatccatct | CTCATTTTGGAGG | ssRNA | |
| | | | TTGGAACTGCTCTCATTTT | cagcctcca | GTAATCACAAC | | |
| | | | GGAGGGTAATCACAAC | | | | |
| 11b | zika_83 | CcaCas13b | cttccctttgcaccatcca | cttccctttgc | GTTGGAACTGCT | Zika | 1b |
| | | | tctcagcctccG | accatccatc | CTCATTTTGGAGG | ssRNA | |
| | | | TTGGAACTGCTCTCATTTT | tcagcctcc | GTAATCACAAC | | |
| | | | GGAGGGTAATCACAAC | | | | |
| 11b | zika_84 | CcaCas13b | ccttccctttgcaccatcc | ccttccctttg | GTTGGAACTGCT | Zika | 1b |
| | | | atctcagcctcG | caccatccat | CTCATTTTGGAGG | ssRNA | |
| | | | TTGGAACTGCTCTCATTTT | ctcagcctc | GTAATCACAAC | | |
| | | | GGAGGGTAATCACAAC | | | | |
| 11b | zika_85 | CcaCas13b | gccttccctttgcaccatc | gccttcccttt | GTTGGAACTGCT | Zika | 1b |
| | | | catctcagcctG | gcaccatcc | CTCATTTTGGAGG | ssRNA | |
| | | | TTGGAACTGCTCTCATTTT | atctcagcct | GTAATCACAAC | | |
| | | | GGAGGGTAATCACAAC | | | | |
| 11b | zika_86 | CcaCas13b | agccttccctttgcaccat | agccttccct | GTTGGAACTGCT | Zika | 1b |
| | | | ccatctcagccG | ttgcaccatc | CTCATTTTGGAGG | ssRNA | |
| | | | TTGGAACTGCTCTCATTTT | catctcagcc | GTAATCACAAC | | |
| | | | GGAGGGTAATCACAAC | | | | |
| 11b | zika_87 | CcaCas13b | cagccttccctttgcacca | cagccttccc | GTTGGAACTGCT | Zika | 1b |
| | | | tccatctcagcG | tttgcaccat | CTCATTTTGGAGG | ssRNA | |
| | | | TTGGAACTGCTCTCATTTT | ccatctcagc | GTAATCACAAC | | |
| | | | GGAGGGTAATCACAAC | | | | |
| 11b | zika_88 | CcaCas13b | acagccttccctttgcacc | acagccttcc | GTTGGAACTGCT | Zika | 1b |
| | | | atccatctcagG | ctttgcacca | CTCATTTTGGAGG | ssRNA | |
| | | | TTGGAACTGCTCTCATTTT | tccatctcag | GTAATCACAAC | | |
| | | | GGAGGGTAATCACAAC | | | | |
| 11b | zika_89 | CcaCas13b | gacagccttccctttgcac | gacagccttc | GTTGGAACTGCT | Zika | 1b |
| | | | catccatctcaG | cctttgcacc | CTCATTTTGGAGG | ssRNA | |
| | | | TTGGAACTGCTCTCATTTT | atccatctca | GTAATCACAAC | | |
| | | | GGAGGGTAATCACAAC | | | | |
| 11b | zika_90 | CcaCas13b | ggacagccttccctttgca | ggacagcct | GTTGGAACTGCT | Zika | 1b |
| | | | ccatccatctcG | tccctttgca | CTCATTTTGGAGG | ssRNA | |
| | | | TTGGAACTGCTCTCATTTT | ccatccatct | GTAATCACAAC | | |
| | | | GGAGGGTAATCACAAC | c | | | |
| 11b | zika_91 | CcaCas13b | aggacagccttccctttgc | aggacagcc | GTTGGAACTGCT | Zika | 1b |
| | | | accatccatctG | ttccctttgca | CTCATTTTGGAGG | ssRNA | |
| | | | TTGGAACTGCTCTCATTTT | ccatccatct | GTAATCACAAC | | |
| | | | GGAGGGTAATCACAAC | | | | |
| 11b | zika_92 | CcaCas13b | gaggacagccttccctttg | gaggacagc | GTTGGAACTGCT | Zika | 1b |
| | | | caccatccatcG | cttccctttgc | CTCATTTTGGAGG | ssRNA | |
| | | | TTGGAACTGCTCTCATTTT | accatccatc | GTAATCACAAC | | |
| | | | GGAGGGTAATCACAAC | | | | |
| 11b | zika_93 | CcaCas13b | agaggacagccttcccttt | agaggacag | GTTGGAACTGCT | Zika | 1b |
| | | | gcaccatccatG | ccttccctttg | CTCATTTTGGAGG | ssRNA | |
| | | | TTGGAACTGCTCTCATTTT | caccatccat | GTAATCACAAC | | |
| | | | GGAGGGTAATCACAAC | | | | |
| 11b | zika_94 | CcaCas13b | cagaggacagccttccctt | cagaggaca | GTTGGAACTGCT | Zika | 1b |
| | | | tgcaccatcca | gccttcccttt | CTCATTTTGGAGG | ssRNA | |
| | | | GTTGGAACTGCTCTCATTT | gcaccatcc | GTAATCACAAC | | |
| | | | TGGAGGGTAATCACAAC | a | | | |
| 9a | dengue_0 | CcaCas13b | tgttgagaggttggcccct | tgttgagagg | GTTGGAACTGCT | Dengue | 9a |
| | | | gaatatgtactG | ttggcccctg | CTCATTTTGGAGG | ssRNA | |
| | | | TTGGAACTGCTCTCATTTT | aatatgtact | GTAATCACAAC | | |
| | | | GGAGGGTAATCACAAC | | | | |
| 9a | dengue_1 | CcaCas13b | ttgttgagaggttggcccc | ttgttgagag | GTTGGAACTGCT | Dengue | 9a |
| | | | tgaatatgtacG | gttggcccct | CTCATTTTGGAGG | ssRNA | |
| | | | TTGGAACTGCTCTCATTTT | gaatatgtac | GTAATCACAAC | | |
| | | | GGAGGGTAATCACAAC | | | | |
| 9a | dengue_2 | CcaCas13b | attgttgagaggttggccc | attgttgaga | GTTGGAACTGCT | Dengue | 9a |
| | | | ctgaatatgtaG | ggttggccc | CTCATTTTGGAGG | ssRNA | |
| | | | TTGGAACTGCTCTCATTTT | ctgaatatgt | GTAATCACAAC | | |
| | | | GGAGGGTAATCACAAC | a | | | |
| 9a | dengue_3 | CcaCas13b | cattgttgagaggttggcc | cattgttgag | GTTGGAACTGCT | Dengue | 9a |
| | | | cctgaatatgtG | aggttggcc | CTCATTTTGGAGG | ssRNA | |
| | | | TTGGAACTGCTCTCATTTT | cctgaatatg | GTAATCACAAC | | |
| | | | GGAGGGTAATCACAAC | t | | | |
| 9a | dengue_4 | CcaCas13b | tcattgttgagaggttggc | tcattgttgag | GTTGGAACTGCT | Dengue | 9a |
| | | | ccctgaatatgG | aggttggcc | CTCATTTTGGAGG | ssRNA | |
| | | | TTGGAACTGCTCTCATTTTG | cctgaatatg | GTAATCACAAC | | |
| | | | GAGGGTAATCACAAC | | | | |
| 9a | dengue_5 | CcaCas13b | gtcattgttgagaggttgg | gtcattgttga | GTTGGAACTGCT | Dengue | 9a |
| | | | cccctgaatatG | gaggttggc | CTCATTTTGGAGG | ssRNA | |
| | | | TTGGAACTGCTCTCATTTTG | ccctgaatat | GTAATCACAAC | | |
| | | | GAGGGTAATCACAAC | | | | |
| 9a | dengue_6 | CcaCas13b | cgtcattgttgagaggttg | cgtcattgttg | GTTGGAACTGCT | Dengue | 9a |
| | | | gcccctgaataG | agaggttgg | CTCATTTTGGAGG | ssRNA | |
| | | | TTGGAACTGCTCTCATTTTG | cccctgaata | GTAATCACAAC | | |
| | | | GAGGGTAATCACAAC | | | | |
| 9a | dengue_7 | CcaCas13b | tcgtcattgttgagaggtt | tcgtcattgtt | GTTGGAACTGCT | Dengue | 9a |
| | | | ggcccctgaatG | gagaggttg | CTCATTTTGGAGG | ssRNA | |
| | | | TTGGAACTGCTCTCATTTTG | gcccctgaat | GTAATCACAAC | | |
| | | | GAGGGTAATCACAAC | | | | |
| 9a | dengue_8 | CcaCas13b | ttcgtcattgttgagaggt | ttcgtcattgt | GTTGGAACTGCT | Dengue | 9a |
| | | | tggcccctgaaG | tgagaggttg | CTCATTTTGGAGG | ssRNA | |
| | | | TTGGAACTGCTCTCATTTTG | gcccctgaa | GTAATCACAAC | | |
| | | | GAGGGTAATCACAAC | | | | |
| 9a | dengue_9 | CcaCas13b | cttcgtcattgttgagagg | cttcgtcattg | GTTGGAACTGCT | Dengue | 9a |
| | | | ttggcccctgaG | ttgagaggtt | CTCATTTTGGAGG | ssRNA | |
| | | | TTGGAACTGCTCTCATTTTG | ggcccctga | GTAATCACAAC | | |
| | | | GAGGGTAATCACAAC | | | | |
| 9a | dengue_1 | CcaCas13b | tcttcgtcattgttgagag | tcttcgtcatt | GTTGGAACTGCT | Dengue | 9a |
| | 0 | | gttggcccctgG | gttgagaggt | CTCATTTTGGAGG | ssRNA | |
| | | | TTGGAACTGCTCTCATTTTG | tggcccctg | GTAATCACAAC | | |
| | | | GAGGGTAATCACAAC | | | | |
| 9a | dengue_1 | CcaCas13b | gtcttcgtcattgttgaga | gtcttcgtcat | GTTGGAACTGCT | Dengue | 9a |
| | 1 | | ggttggcccctG | tgttgagagg | CTCATTTTGGAGG | ssRNA | |
| | | | TTGGAACTGCTCTCATTTTG | ttggcccct | GTAATCACAAC | | |
| | | | GAGGGTAATCACAAC | | | | |
| 9a | dengue_1 | CcaCas13b | ggtcttcgtcattgttgag | ggtcttcgtc | GTTGGAACTGCT | Dengue | 9a |
| | 2 | | aggttggccccG | attgttgaga | CTCATTTTGGAGG | ssRNA | |
| | | | TTGGAACTGCTCTCATTTTG | ggttggccc | GTAATCACAAC | | |
| | | | GAGGGTAATCACAAC | c | | | |
| 9a | dengue_1 | CcaCas13b | tggtcttcgtcattgttga | tggtcttcgtc | GTTGGAACTGCT | Dengue | 9a |
| | 3 | | gaggttggcccG | attgttgaga | CTCATTTTGGAGG | ssRNA | |
| | | | TTGGAACTGCTCTCATTTTG | ggttggccc | GTAATCACAAC | | |
| | | | GAGGGTAATCACAAC | | | | |
| 9a | dengue_1 | CcaCas13b | atggtcttcgtcattgttg | atggtcttcgt | GTTGGAACTGCT | Dengue | 9a |
| | 4 | | agaggttggccG | cattgttgag | CTCATTTTGGAGG | ssRNA | |
| | | | TTGGAACTGCTCTCATTTTG | aggttggcc | GTAATCACAAC | | |
| | | | GAGGGTAATCACAAC | | | | |
| 9a | dengue_1 | CcaCas13b | catggtcttcgtcattgtt | catggtcttc | GTTGGAACTGCT | Dengue | 9a |
| | 5 | | gagaggttggcG | gtcattgttga | CTCATTTTGGAGG | ssRNA | |
| | | | TTGGAACTGCTCTCATTTTG | gaggttggc | GTAATCACAAC | | |
| | | | GAGGGTAATCACAAC | | | | |
| 9a | dengue_1 | CcaCas13b | gcatggtcttcgtcattgt | gcatggtctt | GTTGGAACTGCT | Dengue | 9a |
| | 6 | | tgagaggttggG | cgtcattgttg | CTCATTTTGGAGG | ssRNA | |
| | | | TTGGAACTGCTCTCATTTTG | agaggttgg | GTAATCACAAC | | |
| | | | GAGGGTAATCACAAC | | | | |
| 9a | dengue_1 | CcaCas13b | agcatggtcttcgtcattg | agcatggtct | GTTGGAACTGCT | Dengue | 9a |
| | 7 | | ttgagaggttgG | tcgtcattgtt | CTCATTTTGGAGG | ssRNA | |
| | | | TTGGAACTGCTCTCATTTTG | gagaggttg | GTAATCACAAC | | |
| | | | GAGGGTAATCACAAC | | | | |
| 9a | dengue_1 | CcaCas13b | gagcatggtcttcgtcatt | gagcatggt | GTTGGAACTGCT | Dengue | 9a |
| | 8 | | gttgagaggttG | cttcgtcattg | CTCATTTTGGAGG | ssRNA | |
| | | | TTGGAACTGCTCTCATTTTG | ttgagaggtt | GTAATCACAAC | | |
| | | | GAGGGTAATCACAAC | | | | |
| 9a | dengue_1 | CcaCas13b | tgagcatggtcttcgtcat | tgagcatggt | GTTGGAACTGCT | Dengue | 9a |
| | 9 | | tgttgagaggtG | cttcgtcattg | CTCATTTTGGAGG | ssRNA | |
| | | | TTGGAACTGCTCTCATTTTG | ttgagaggt | GTAATCACAAC | | |
| | | | GAGGGTAATCACAAC | | | | |
| 9a | dengue_2 | CcaCas13b | agtgagcatggtcttcgtc | agtgagcat | GTTGGAACTGCT | Dengue | 9a |
| | 0 | | attgttgagagG | ggtcttcgtc | CTCATTTTGGAGG | ssRNA | |
| | | | TTGGAACTGCTCTCATTTTG | attgttgaga | GTAATCACAAC | | |
| | | | GAGGGTAATCACAAC | g | | | |
| 9a | dengue_2 | CcaCas13b | ccagtgagcatggtcttcg | ccagtgagc | GTTGGAACTGCT | Dengue | 9a |
| | 1 | | tcattgttgagG | atggtcttcgt | CTCATTTTGGAGG | ssRNA | |
| | | | TTGGAACTGCTCTCATTTTG | cattgttgag | GTAATCACAAC | | |
| | | | GAGGGTAATCACAAC | | | | |
| 9a | dengue_2 | CcaCas13b | gtccagtgagcatggtctt | gtccagtga | GTTGGAACTGCT | Dengue | 9a |
| | 2 | | cgtcattgttgG | gcatggtctt | CTCATTTTGGAGG | ssRNA | |
| | | | TTGGAACTGCTCTCATTTTG | cgtcattgttg | GTAATCACAAC | | |
| | | | GAGGGTAATCACAAC | | | | |
| 9a | dengue_2 | CcaCas13b | ctgtccagtgagcatggtc | ctgtccagtg | GTTGGAACTGCT | Dengue | 9a |
| | 3 | | ttcgtcattgtG | agcatggtct | CTCATTTTGGAGG | ssRNA | |
| | | | TTGGAACTGCTCTCATTTTG | tcgtcattgt | GTAATCACAAC | | |
| | | | GAGGGTAATCACAAC | | | | |
| 9a | dengue_2 | CcaCas13b | ttctgtccagtgagcatgg | ttctgtccagt | GTTGGAACTGCT | Dengue | 9a |
| | 4 | | tcttcgtcattGT | gagcatggt | CTCATTTTGGAGG | ssRNA | |
| | | | TGGAACTGCTCTCATTTTG | cttcgtcatt | GTAATCACAAC | | |
| | | | GAGGGTAATCACAAC | | | | |
| 9a | dengue_2 | CcaCas13b | gcttctgtccagtgagcat | gcttctgtcc | GTTGGAACTGCT | Dengue | 9a |
| | 5 | | ggtcttcgtcaG | agtgagcat | CTCATTTTGGAGG | ssRNA | |
| | | | TTGGAACTGCTCTCATTTTG | ggtcttcgtc | GTAATCACAAC | | |
| | | | GAGGGTAATCACAAC | a | | | |
| 9a | dengue_2 | CcaCas13b | ttgcttctgtccagtgagc | ttgcttctgtc | GTTGGAACTGCT | Dengue | 9a |
| | 6 | | atggtcttcgtGT | cagtgagca | CTCATTTTGGAGG | ssRNA | |
| | | | TGGAACTGCTCTCATTTTG | tggtcttcgt | GTAATCACAAC | | |
| | | | GAGGGTAATCACAAC | | | | |
| 9a | dengue_2 | CcaCas13b | ttttgcttctgtccagtga | ttttgcttctgt | GTTGGAACTGCT | Dengue | 9a |
| | 7 | | gcatggtcttcGT | ccagtgagc | CTCATTTTGGAGG | ssRNA | |
| | | | TGGAACTGCTCTCATTTTG | atggtcttc | GTAATCACAAC | | |
| | | | GAGGGTAATCACAAC | | | | |
| 9a | dengue_2 | CcaCas13b | atttttgcttctgtccagt | atttttgcttct | GTTGGAACTGCT | Dengue | 9a |
| | 8 | | gagcatggtctGT | gtccagtga | CTCATTTTGGAGG | ssRNA | |
| | | | TGGAACTGCTCTCATTTTG | gcatggtct | GTAATCACAAC | | |
| | | | GAGGGTAATCACAAC | | | | |
| 9a | dengue_2 | CcaCas13b | gcatttttgcttctgtcca | gcatttttgct | GTTGGAACTGCT | Dengue | 9a |
| | 9 | | gtgagcatggtGT | tctgtccagt | CTCATTTTGGAGG | ssRNA | |
| | | | TGGAACTGCTCTCATTTTG | gagcatggt | GTAATCACAAC | | |
| | | | GAGGGTAATCACAAC | | | | |
| 9a | dengue_3 | CcaCas13b | cagcatttttgcttctgtc | cagcatttttg | GTTGGAACTGCT | Dengue | 9a |
| | 0 | | cagtgagcatgGT | cttctgtcca | CTCATTTTGGAGG | ssRNA | |
| | | | TGGAACTGCTCTCATTTTG | gtgagcatg | GTAATCACAAC | | |
| | | | GAGGGTAATCACAAC | | | | |
| 9a | dengue_3 | CcaCas13b | agcagcatttttgcttctg | agcagcattt | GTTGGAACTGCT | Dengue | 9a |
| | 1 | | tccagtgagcaG | ttgcttctgtc | CTCATTTTGGAGG | ssRNA | |
| | | | TTGGAACTGCTCTCATTTTG | cagtgagca | GTAATCACAAC | | |
| | | | GAGGGTAATCACAAC | | | | |
| 9a | dengue_3 | CcaCas13b | ccagcagcatttttgcttc | ccagcagca | GTTGGAACTGCT | Dengue | 9a |
| | 2 | | tgtccagtgagG | tttttgcttctg | CTCATTTTGGAGG | ssRNA | |
| | | | TTGGAACTGCTCTCATTTTG | tccagtgag | GTAATCACAAC | | |
| | | | GAGGGTAATCACAAC | | | | |
| 9a | dengue_3 | CcaCas13b | gtccagcagcatttttgct | gtccagcag | GTTGGAACTGCT | Dengue | 9a |
| | 3 | | tctgtccagtgGT | catttttgcttc | CTCATTTTGGAGG | ssRNA | |
| | | | TGGAACTGCTCTCATTTTG | tgtccagtg | GTAATCACAAC | | |
| | | | GAGGGTAATCACAAC | | | | |
| 9a | dengue_3 | CcaCas13b | ttgtccagcagcatttttg | ttgtccagca | GTTGGAACTGCT | Dengue | 9a |
| | 4 | | cttctgtccagGT | gcatttttgct | CTCATTTTGGAGG | ssRNA | |
| | | | TGGAACTGCTCTCATTTTG | tctgtccag | GTAATCACAAC | | |
| | | | GAGGGTAATCACAAC | | | | |
| 9a | dengue_3 | CcaCas13b | tgttgtccagcagcatttt | tgttgtccag | GTTGGAACTGCT | Dengue | 9a |
| | 5 | | tgcttctgtccGT | cagcatttttg | CTCATTTTGGAGG | ssRNA | |
| | | | TGGAACTGCTCTCATTTTG | cttctgtcc | GTAATCACAAC | | |
| | | | GAGGGTAATCACAAC | | | | |
| 9a | dengue_3 | CcaCas13b | gatgttgtccagcagcatt | gatgttgtcc | GTTGGAACTGCT | Dengue | 9a |
| | 6 | | tttgcttctgtGT | agcagcattt | CTCATTTTGGAGG | ssRNA | |
| | | | TGGAACTGCTCTCATTTTG | ttgcttctgt | GTAATCACAAC | | |
| | | | GAGGGTAATCACAAC | | | | |
| 9a | dengue_3 | CcaCas13b | ttgatgttgtccagcagca | ttgatgttgtc | GTTGGAACTGCT | Dengue | 9a |
| | 7 | | tttttgcttctGT | cagcagcatt | CTCATTTTGGAGG | ssRNA | |
| | | | TGGAACTGCTCTCATTTTG | tttgcttct | GTAATCACAAC | | |
| | | | GAGGGTAATCACAAC | | | | |
| 9a | dengue_3 | CcaCas13b | tgttgatgttgtccagcag | tgttgatgttg | GTTGGAACTGCT | Dengue | 9a |
| | 8 | | catttttgcttGT | tccagcagc | CTCATTTTGGAGG | ssRNA | |
| | | | TGGAACTGCTCTCATTTTG | atttttgctt | GTAATCACAAC | | |
| | | | GAGGGTAATCACAAC | | | | |
| 9a | dengue_3 | CcaCas13b | tgtgttgatgttgtccagc | tgtgttgatgt | GTTGGAACTGCT | Dengue | 9a |
| | 9 | | agcatttttgcGT | tgtccagca | CTCATTTTGGAGG | ssRNA | |
| | | | TGGAACTGCTCTCATTTTG | gcatttttgc | GTAATCACAAC | | |
| | | | GAGGGTAATCACAAC | | | | |
| 9a | dengue_4 | CcaCas13b | ggtgtgttgatgttgtcca | ggtgtgttga | GTTGGAACTGCT | Dengue | 9a |
| | 0 | | gcagcatttttGT | tgttgtccag | CTCATTTTGGAGG | ssRNA | |
| | | | TGGAACTGCTCTCATTTTG | cagcattttt | GTAATCACAAC | | |
| | | | GAGGGTAATCACAAC | | | | |
| 9a | dengue_4 | CcaCas13b | ctggtgtgttgatgttgtc | ctggtgtgtt | GTTGGAACTGCT | Dengue | 9a |
| | 1 | | cagcagcatttGT | gatgttgtcc | CTCATTTTGGAGG | ssRNA | |
| | | | TGGAACTGCTCTCATTTTG | agcagcattt | GTAATCACAAC | | |
| | | | GAGGGTAATCACAAC | | | | |
| 9a | dengue_4 | CcaCas13b | ttctggtgtgttgatgttg | ttctggtgtgt | GTTGGAACTGCT | Dengue | 9a |
| | 2 | | tccagcagcatGT | tgatgttgtcc | CTCATTTTGGAGG | ssRNA | |
| | | | TGGAACTGCTCTCATTTTG | agcagcat | GTAATCACAAC | | |
| | | | GAGGGTAATCACAAC | | | | |
| 9a | dengue_4 | CcaCas13b | ccttctggtgtgttgatgt | ccttctggtgt | GTTGGAACTGCT | Dengue | 9a |
| | 3 | | tgtccagcagcG | gttgatgttgt | CTCATTTTGGAGG | ssRNA | |
| | | | TTGGAACTGCTCTCATTTTG | ccagcagc | GTAATCACAAC | | |
| | | | GAGGGTAATCACAAC | | | | |
| 9a | dengue_4 | CcaCas13b | tcccttctggtgtgttgat | tcccttctggt | GTTGGAACTGCT | Dengue | 9a |
| | 4 | | gttgtccagcaGT | gtgttgatgtt | CTCATTTTGGAGG | ssRNA | |
| | | | TGGAACTGCTCTCATTTTG | gtccagca | GTAATCACAAC | | |
| | | | GAGGGTAATCACAAC | | | | |
| 9a | dengue_4 | CcaCas13b | aatcccttctggtgtgttg | aatcccttct | GTTGGAACTGCT | Dengue | 9a |
| | 5 | | atgttgtccagGT | ggtgtgttga | CTCATTTTGGAGG | ssRNA | |
| | | | TGGAACTGCTCTCATTTTG | tgttgtccag | GTAATCACAAC | | |
| | | | GAGGGTAATCACAAC | | | | |
| 9a | dengue_4 | CcaCas13b | ataatcccttctggtgtgt | ataatcccttc | GTTGGAACTGCT | Dengue | 9a |
| | 6 | | tgatgttgtccGT | tggtgtgttg | CTCATTTTGGAGG | ssRNA | |
| | | | TGGAACTGCTCTCATTTTG | atgttgtcc | GTAATCACAAC | | |
| | | | GAGGGTAATCACAAC | | | | |
| 9a | dengue_4 | CcaCas13b | gtataatcccttctggtgt | gtataatccc | GTTGGAACTGCT | Dengue | 9a |
| | 7 | | gttgatgttgtGT | CTCATTTTGGAGG | ssRNA | | |
| | | | TGGAACTGCTCTCATTTTG | ttctggtgtgt | GTAATCACAAC | | |
| | | | GAGGGTAATCACAAC | tgatgttgt | | | |
| 9a | dengue_4 | CcaCas13b | tggtataatcccttctggt | tggtataatc | GTTGGAACTGCT | Dengue | 9a |
| | 8 | | gtgttgatgttGT | ccttctggtgt | CTCATTTTGGAGG | ssRNA | |
| | | | TGGAACTGCTCTCATTTTG | gttgatgtt | GTAATCACAAC | | |
| | | | GAGGGTAATCACAAC | | | | |
| 9a | dengue_4 | CcaCas13b | gctggtataatcccttctg | gctggtataa | GTTGGAACTGCT | Dengue | 9a |
| | 9 | | gtgtgttgatgGT | tcccttctggt | CTCATTTTGGAGG | ssRNA | |
| | | | TGGAACTGCTCTCATTTTG | gtgttgatg | GTAATCACAAC | | |
| | | | GAGGGTAATCACAAC | | | | |
| 9a | dengue_5 | CcaCas13b | gagctggtataatcccttc | gagctggtat | GTTGGAACTGCT | Dengue | 9a |
| | 0 | | tggtgtgttgaG | aatcccttct | CTCATTTTGGAGG | ssRNA | |
| | | | TTGGAACTGCTCTCATTTTG | ggtgtgttga | GTAATCACAAC | | |
| | | | GAGGGTAATCACAAC | | | | |
| 9a | dengue_5 | CcaCas13b | gagagctggtataatccct | gagagctgg | GTTGGAACTGCT | Dengue | 9a |
| | 1 | | tctggtgtgttG | tataatccctt | CTCATTTTGGAGG | ssRNA | |
| | | | TTGGAACTGCTCTCATTTTG | ctggtgtgtt | GTAATCACAAC | | |
| | | | GAGGGTAATCACAAC | | | | |
| 9a | dengue_5 | CcaCas13b | aagagagctggtataatcc | aagagagct | GTTGGAACTGCT | Dengue | 9a |
| | 2 | | cttctggtgtgG | ggtataatcc | CTCATTTTGGAGG | ssRNA | |
| | | | TTGGAACTGCTCTCATTTTG | cttctggtgt | GTAATCACAAC | | |
| | | | GAGGGTAATCACAAC | g | | | |
| 9a | dengue_5 | CcaCas13b | caaagagagctggtataat | caaagagag | GTTGGAACTGCT | Dengue | 9a |
| | 3 | | cccttctggtgG | ctggtataat | CTCATTTTGGAGG | ssRNA | |
| | | | TTGGAACTGCTCTCATTTTG | cccttctggt | GTAATCACAAC | | |
| | | | GAGGGTAATCACAAC | g | | | |
| 9a | dengue_5 | CcaCas13b | ttcaaagagagctggtata | ttcaaagaga | GTTGGAACTGCT | Dengue | 9a |
| | 4 | | atcccttctggG | gctggtataa | CTCATTTTGGAGG | ssRNA | |
| | | | TTGGAACTGCTCTCATTTTG | tcccttctgg | GTAATCACAAC | | |
| | | | GAGGGTAATCACAAC | | | | |
| 9a | dengue_5 | CcaCas13b | ggttcaaagagagctggta | ggttcaaag | GTTGGAACTGCT | Dengue | 9a |
| | 5 | | taatcccttctG | agagctggt | CTCATTTTGGAGG | ssRNA | |
| | | | TTGGAACTGCTCTCATTTTG | ataatcccttc | GTAATCACAAC | | |
| | | | GAGGGTAATCACAAC | t | | | |
| 9a | dengue_5 | CcaCas13b | ctggttcaaagagagctgg | ctggttcaaa | GTTGGAACTGCT | Dengue | 9a |
| | 6 | | tataatcccttG | gagagctgg | CTCATTTTGGAGG | ssRNA | |
| | | | TTGGAACTGCTCTCATTTTG | tataatccctt | GTAATCACAAC | | |
| | | | GAGGGTAATCACAAC | | | | |
| 9a | dengue_5 | CcaCas13b | ttctggttcaaagagagct | ttctggttcaa | GTTGGAACTGCT | Dengue | 9a |
| | 7 | | ggtataatcccG | agagagctg | CTCATTTTGGAGG | ssRNA | |
| | | | TTGGAACTGCTCTCATTTTG | gtataatccc | GTAATCACAAC | | |
| | | | GAGGGTAATCACAAC | | | | |
| 9a | dengue_5 | CcaCas13b | ctttctggttcaaagagag | ctttctggttc | GTTGGAACTGCT | Dengue | 9a |
| | 8 | | ctggtataatcG | aaagagagc | CTCATTTTGGAGG | ssRNA | |
| | | | TTGGAACTGCTCTCATTTTG | tggtataatc | GTAATCACAAC | | |
| | | | GAGGGTAATCACAAC | | | | |
| 9a | dengue_5 | CcaCas13b | ccctttctggttcaaagag | ccctttctggt | GTTGGAACTGCT | Dengue | 9a |
| | 9 | | agctggtataaG | tcaaagaga | CTCATTTTGGAGG | ssRNA | |
| | | | TTGGAACTGCTCTCATTTTG | gctggtataa | GTAATCACAAC | | |
| | | | GAGGGTAATCACAAC | | | | |
| 9a | dengue_6 | CcaCas13b | ctccctttctggttcaaag | ctccctttctg | GTTGGAACTGCT | Dengue | 9a |
| | 0 | | agagctggtatG | gttcaaaga | CTCATTTTGGAGG | ssRNA | |
| | | | TTGGAACTGCTCTCATTTTG | gagctggtat | GTAATCACAAC | | |
| | | | GAGGGTAATCACAAC | | | | |
| 9a | dengue_6 | CcaCas13b | ttctccctttctggttcaa | ttctccctttct | GTTGGAACTGCT | Dengue | 9a |
| | 1 | | agagagctggtGT | ggttcaaag | CTCATTTTGGAGG | ssRNA | |
| | | | TGGAACTGCTCTCATTTTG | agagctggt | GTAATCACAAC | | |
| | | | GAGGGTAATCACAAC | | | | |
| 9a | dengue_6 | CcaCas13b | acttctccctttctggttca | acttctccctt | GTTGGAACTGCT | Dengue | 9a |
| | 2 | | aagagagctgG | tctggttcaa | CTCATTTTGGAGG | ssRNA | |
| | | | TTGGAACTGCTCTCATTTTG | agagagctg | GTAATCACAAC | | |
| | | | GAGGGTAATCACAAC | | | | |
| 9a | dengue_6 | CcaCas13b | tgacttctccctttctggtt | tgacttctcc | GTTGGAACTGCT | Dengue | 9a |
| | 3 | | caaagagagcG | ctttctggttc | CTCATTTTGGAGG | ssRNA | |
| | | | TTGGAACTGCTCTCATTTTG | aaagagagc | GTAATCACAAC | | |
| | | | GAGGGTAATCACAAC | | | | |
| 9a | dengue_6 | CcaCas13b | gctgacttctccctttctgg | gctgacttct | GTTGGAACTGCT | Dengue | 9a |
| | 4 | | ttcaaagagaG | ccctttctggt | CTCATTTTGGAGG | ssRNA | |
| | | | TTGGAACTGCTCTCATTTTG | tcaaagaga | GTAATCACAAC | | |
| | | | GAGGGTAATCACAAC | | | | |
| 9a | dengue_6 | CcaCas13b | ggctgacttctccctttctg | ggctgacttc | GTTGGAACTGCT | Dengue | 9a |
| | 5 | | gttcaaagagG | tccctttctgg | CTCATTTTGGAGG | ssRNA | |
| | | | TTGGAACTGCTCTCATTTTG | ttcaaagag | GTAATCACAAC | | |
| | | | GAGGGTAATCACAAC | | | | |
| 9a | dengue_6 | CcaCas13b | cggctgacttctccctttct | cggctgactt | GTTGGAACTGCT | Dengue | 9a |
| | 6 | | ggttcaaagaG | ctccctttctg | CTCATTTTGGAGG | ssRNA | |
| | | | TTGGAACTGCTCTCATTTTG | gttcaaaga | GTAATCACAAC | | |
| | | | GAGGGTAATCACAAC | | | | |
| 9a | dengue_6 | CcaCas13b | gcggctgacttctccctttc | gcggctgac | GTTGGAACTGCT | Dengue | 9a |
| | 7 | | tggttcaaagG | ttctccctttct | CTCATTTTGGAGG | ssRNA | |
| | | | TTGGAACTGCTCTCATTTTG | ggttcaaag | GTAATCACAAC | | |
| | | | GAGGGTAATCACAAC | | | | |
| 9a | dengue_6 | CcaCas13b | ggcggctgacttctcccttt | ggcggctga | GTTGGAACTGCT | Dengue | 9a |
| | 8 | | ctggttcaaaG | cttctcccttt | CTCATTTTGGAGG | ssRNA | |
| | | | TTGGAACTGCTCTCATTTTG | ctggttcaaa | GTAATCACAAC | | |
| | | | GAGGGTAATCACAAC | | | | |
| 9a | dengue_6 | CcaCas13b | tggcggctgacttctccctt | t tggcggctg | GTTGGAACTGCT | Dengue | 9a |
| | 9 | | ctggttcaaGT | acttctccctt | CTCATTTTGGAGG | ssRNA | |
| | | | TGGAACTGCTCTCATTTTG | tctggttcaa | GTAATCACAAC | | |
| | | | GAGGGTAATCACAAC | | | | |
| 9a | dengue_7 | CcaCas13b | atggcggctgacttctccct | atggcggct | GTTGGAACTGCT | Dengue | 9a |
| | 0 | | ttctggttcaGT | gacttctccc | CTCATTTTGGAGG | ssRNA | |
| | | | TGGAACTGCTCTCATTTTG | tttctggttca | GTAATCACAAC | | |
| | | | GAGGGTAATCACAAC | | | | |
| 9a | dengue_7 | CcaCas13b | tatggcggctgacttctccc | tatggcggct | GTTGGAACTGCT | Dengue | 9a |
| | 1 | | tttctggttcGT | gacttctccc | CTCATTTTGGAGG | ssRNA | |
| | | | TGGAACTGCTCTCATTTTG | tttctggttc | GTAATCACAAC | | |
| | | | GAGGGTAATCACAAC | | | | |
| 9a | dengue_7 | CcaCas13b | ctatggcggctgacttctcc | ctatggcgg | GTTGGAACTGCT | Dengue | 9a |
| | 2 | | ctttctggttGT | ctgacttctc | CTCATTTTGGAGG | ssRNA | |
| | | | TGGAACTGCTCTCATTTTG | cctttctggtt | GTAATCACAAC | | |
| | | | GAGGGTAATCACAAC | | | | |
| 9a | dengue_7 | CcaCas13b | tctatggcggctgacttctc | tctatggcgg | GTTGGAACTGCT | Dengue | 9a |
| | 3 | | cctttctggtGT | ctgacttctc | CTCATTTTGGAGG | ssRNA | |
| | | | TGGAACTGCTCTCATTTTG | cctttctggt | GTAATCACAAC | | |
| | | | GAGGGTAATCACAAC | | | | |
| 9a | dengue_7 | CcaCas13b | gtctatggcggctgacttct | gtctatggcg | GTTGGAACTGCT | Dengue | 9a |
| | 4 | | ccctttctggG | gctgacttct | CTCATTTTGGAGG | ssRNA | |
| | | | TTGGAACTGCTCTCATTTTG | ccctttctgg | GTAATCACAAC | | |
| | | | GAGGGTAATCACAAC | | | | |
| 9a | dengue_7 | CcaCas13b | cgtctatggcggctgacttc | cgtctatggc | GTTGGAACTGCT | Dengue | 9a |
| | 5 | | tccctttctgGT | ggctgacttc | CTCATTTTGGAGG | ssRNA | |
| | | | TGGAACTGCTCTCATTTTG | tccctttctg | GTAATCACAAC | | |
| | | | GAGGGTAATCACAAC | | | | |
| 9a | dengue_7 | CcaCas13b | ccgtctatggcggctgactt | ccgtctatgg | GTTGGAACTGCT | Dengue | 9a |
| | 6 | | ctccctttctGT | cggctgactt | CTCATTTTGGAGG | ssRNA | |
| | | | TGGAACTGCTCTCATTTTG | ctccctttct | GTAATCACAAC | | |
| | | | GAGGGTAATCACAAC | | | | |
| 9a | dengue_7 | CcaCas13b | accgtctatggcggctgact | accgtctatg | GTTGGAACTGCT | Dengue | 9a |
| | 7 | | tctccctttcG | gcggctgac | CTCATTTTGGAGG | ssRNA | |
| | | | TTGGAACTGCTCTCATTTTG | ttctccctttc | GTAATCACAAC | | |
| | | | GAGGGTAATCACAAC | | | | |
| 9a | dengue_7 | CcaCas13b | caccgtctatggcggctgac | caccgtctat | GTTGGAACTGCT | Dengue | 9a |
| | 8 | | ttctccctttG | ggcggctga | CTCATTTTGGAGG | ssRNA | |
| | | | TTGGAACTGCTCTCATTTTG | cttctcccttt | GTAATCACAAC | | |
| | | | GAGGGTAATCACAAC | | | | |
| 9a | dengue_7 | CcaCas 13b | tcaccgtctatggcggctga | tcaccgtcta | GTTGGAACTGCT | Dengue | 9a |
| | 9 | | cttctcccttG | tggcggctg | CTCATTTTGGAGG | ssRNA | |
| | | | TTGGAACTGCTCTCATTTTG | acttctccctt | GTAATCACAAC | | |
| | | | GAGGGTAATCACAAC | | | | |
| 9a | dengue_8 | CcaCas13b | ttcaccgtctatggcggctg | ttcaccgtct | GTTGGAACTGCT | Dengue | 9a |
| | 0 | | acttctccctG | atggcggct | CTCATTTTGGAGG | ssRNA | |
| | | | TTGGAACTGCTCTCATTTTG | gacttctccc | GTAATCACAAC | | |
| | | | GAGGGTAATCACAAC | t | | | |
| 9a | dengue_8 | CcaCas13b | attcaccgtctatggcggct | attcaccgtc | GTTGGAACTGCT | Dengue | 9a |
| | 1 | | gacttctcccG | tatggcggct | CTCATTTTGGAGG | ssRNA | |
| | | | TTGGAACTGCTCTCATTTTG | gacttctccc | GTAATCACAAC | | |
| | | | GAGGGTAATCACAAC | | | | |
| 9a | dengue_8 | CcaCas13b | tattcaccgtctatggcggc | tattcaccgt | GTTGGAACTGCT | Dengue | 9a |
| | 2 | | tgacttctccG | ctatggcgg | CTCATTTTGGAGG | ssRNA | |
| | | | TTGGAACTGCTCTCATTTTG | ctgacttctc | GTAATCACAAC | | |
| | | | GAGGGTAATCACAAC | c | | | |
| 9a | dengue_8 | CcaCas13b | gtattcaccgtctatggcgg | gtattcaccg | GTTGGAACTGCT | Dengue | 9a |
| | 3 | | ctgacttctcG | tctatggcgg | CTCATTTTGGAGG | ssRNA | |
| | | | TTGGAACTGCTCTCATTTTG | ctgacttctc | GTAATCACAAC | | |
| | | | GAGGGTAATCACAAC | | | | |
| 9a | dengue_8 | CcaCas13b | ggtattcaccgtctatggcg | ggtattcacc | GTTGGAACTGCT | Dengue | 9a |
| | 4 | | gctgacttctG | gtctatggcg | CTCATTTTGGAGG | ssRNA | |
| | | | TTGGAACTGCTCTCATTTTG | gctgacttct | GTAATCACAAC | | |
| | | | GAGGGTAATCACAAC | | | | |
| 9a | dengue_8 | CcaCas13b | cggtattcaccgtctatggc | cggtattcac | GTTGGAACTGCT | Dengue | 9a |
| | 5 | | ggctgacttcG | cgtctatggc | CTCATTTTGGAGG | ssRNA | |
| | | | TTGGAACTGCTCTCATTTTG | ggctgacttc | GTAATCACAAC | | |
| | | | GAGGGTAATCACAAC | | | | |
| 9a | dengue_8 | CcaCas13b | gcggtattcaccgtctatgg | gcggtattca | GTTGGAACTGCT | Dengue | 9a |
| | 6 | | cggctgacttG | ccgtctatgg | CTCATTTTGGAGG | ssRNA | |
| | | | TTGGAACTGCTCTCATTTTG | cggctgactt | GTAATCACAAC | | |
| | | | GAGGGTAATCACAAC | | | | |
| 9a | dengue_8 | CcaCas13b | ggcggtattcaccgtctatg | ggcggtattc | GTTGGAACTGCT | Dengue | 9a |
| | 7 | | gcggctgact | accgtctatg | CTCATTTTGGAGG | ssRNA | |
| | | | GTTGGAACTGCTCTCATTTT | gcggctgac | GTAATCACAAC | | |
| | | | GGAGGGTAATCACAAC | t | | | |
| 9a | dengue_8 | CcaCas13b | aggcggtattcaccgtctat | aggcggtatt | GTTGGAACTGCT | Dengue | 9a |
| | 8 | | ggcggctgac | caccgtctat | CTCATTTTGGAGG | ssRNA | |
| | | | GTTGGAACTGCTCTCATTTT | ggcggctga | GTAATCACAAC | | |
| | | | GGAGGGTAATCACAAC | c | | | |
| 9a | dengue_8 | CcaCas13b | caggcggtattcaccgtcta | caggcggta | GTTGGAACTGCT | Dengue | 9a |
| | 9 | | tggcggctga | ttcaccgtct | CTCATTTTGGAGG | ssRNA | |
| | | | GTTGGAACTGCTCTCATTTT | atggcggct | GTAATCACAAC | | |
| | | | GGAGGGTAATCACAAC | ga | | | |
| 9a | dengue_9 | CcaCas13b | tcaggcggtattcaccgtct | tcaggcggt | GTTGGAACTGCT | Dengue | 9a |
| | 0 | | atggcggctg | attcaccgtc | CTCATTTTGGAGG | ssRNA | |
| | | | GTTGGAACTGCTCTCATTTT | tatggcggct | GTAATCACAAC | | |
| | | | GGAGGGTAATCACAAC | g | | | |
| 9a | dengue_9 | CcaCas13b | ttcaggcggtattcaccgtc | ttcaggcggt | GTTGGAACTGCT | Dengue | 9a |
| | 1 | | tatggcggctG | attcaccgtc | CTCATTTTGGAGG | ssRNA | |
| | | | TTGGAACTGCTCTCATTTTG | tatggcggct | GTAATCACAAC | | |
| | | | GAGGGTAATCACAAC | | | | |
| 9a | dengue_9 | CcaCas13b | cttcaggcggtattcaccgt | cttcaggcg | GTTGGAACTGCT | Dengue | 9a |
| | 2 | | ctatggcggcG | gtattcaccg | CTCATTTTGGAGG | ssRNA | |
| | | | TTGGAACTGCTCTCATTTTG | tctatggcgg | GTAATCACAAC | | |
| | | | GAGGGTAATCACAAC | c | | | |
| 9a | dengue_9 | CcaCas13b | ccttcaggcggtattcaccg | ccttcaggc | GTTGGAACTGCT | Dengue | 9a |
| | 3 | | tctatggcggG | ggtattcacc | CTCATTTTGGAGG | ssRNA | |
| | | | TTGGAACTGCTCTCATTTTG | gtctatggcg | GTAATCACAAC | | |
| | | | GAGGGTAATCACAAC | g | | | |
| 9a | dengue_9 | CcaCas13b | cccttcaggcggtattcacc | cccttcaggc | GTTGGAACTGCT | Dengue | 9a |
| | 4 | | gtctatggcgG | ggtattcacc | CTCATTTTGGAGG | ssRNA | |
| | | | TTGGAACTGCTCTCATTTTG | gtctatggcg | GTAATCACAAC | | |
| | | | GAGGGTAATCACAAC | | | | |
| 9a | thermo_0 | CcaCas13b | attaatttaacagtatcacc | attaatttaac | GTTGGAACTGCT | Thermo- | 9a |
| | | | atcaatcgctGT | agtatcacca | CTCATTTTGGAGG | nuclease | |
| | | | TGGAACTGCTCTCATTTTG | tcaatcgct | GTAATCACAAC | | |
| | | | GAGGGTAATCACAAC | | | | |
| 9a | thermo_1 | CcaCas13b | cattaatttaacagtatcac | cattaatttaa | GTTGGAACTGCT | Thermo- | 9a |
| | | | catcaatcgcG | cagtatcacc | CTCATTTTGGAGG | nuclease | |
| | | | TTGGAACTGCTCTCATTTTG | atcaatcgc | GTAATCACAAC | | |
| | | | GAGGGTAATCACAAC | | | | |
| 9a | thermo_2 | CcaCas13b | acattaatttaacagtatca | acattaattta | GTTGGAACTGCT | Thermo- | 9a |
| | | | ccatcaatcgG | acagtatcac | CTCATTTTGGAGG | nuclease | |
| | | | TTGGAACTGCTCTCATTTTG | catcaatcg | GTAATCACAAC | | |
| | | | GAGGGTAATCACAAC | | | | |
| 9a | thermo_3 | CcaCas13b | tacattaatttaacagtatc | tacattaattt | GTTGGAACTGCT | Thermo- | 9a |
| | | | accatcaatcGT | aacagtatca | CTCATTTTGGAGG | nuclease | |
| | | | TGGAACTGCTCTCATTTTG | ccatcaatc | GTAATCACAAC | | |
| | | | GAGGGTAATCACAAC | | | | |
| 9a | thermo_4 | CcaCas13b | gtacattaatttaacagtat | gtacattaatt | GTTGGAACTGCT | Thermo- | 9a |
| | | | caccatcaatGT | taacagtatc | CTCATTTTGGAGG | nuclease | |
| | | | TGGAACTGCTCTCATTTTG | accatcaat | GTAATCACAAC | | |
| | | | GAGGGTAATCACAAC | | | | |
| 9a | thermo_5 | CcaCas13b | tgtacattaatttaacagta | tgtacattaat | GTTGGAACTGCT | Thermo- | 9a |
| | | | tcaccatcaaGT | ttaacagtat | CTCATTTTGGAGG | nuclease | |
| | | | TGGAACTGCTCTCATTTTG | caccatcaa | GTAATCACAAC | | |
| | | | GAGGGTAATCACAAC | | | | |
| 9a | thermo_6 | CcaCas13b | ttgtacattaatttaacagt | ttgtacattaa | GTTGGAACTGCT | Thermo- | 9a |
| | | | atcaccatcaGT | tttaacagtat | CTCATTTTGGAGG | nuclease | |
| | | | TGGAACTGCTCTCATTTTG | caccatca | GTAATCACAAC | | |
| | | | GAGGGTAATCACAAC | | | | |
| 9a | thermo_7 | CcaCas13b | tttgtacattaatttaacag | tttgtacatta | GTTGGAACTGCT | Thermo- | 9a |
| | | | tatcaccatcGT | atttaacagt | CTCATTTTGGAGG | nuclease | |
| | | | TGGAACTGCTCTCATTTTG | atcaccatc | GTAATCACAAC | | |
| | | | GAGGGTAATCACAAC | | | | |
| 9a | thermo_8 | CcaCas13b | ctttgtacattaatttaaca | ctttgtacatt | GTTGGAACTGCT | Thermo- | 9a |
| | | | gtatcaccatGT | aatttaacag | CTCATTTTGGAGG | nuclease | |
| | | | TGGAACTGCTCTCATTTTG | tatcaccat | GTAATCACAAC | | |
| | | | GAGGGTAATCACAAC | | | | |
| 9a | thermo_9 | CcaCas13b | cctttgtacattaatttaac | cctttgtacat | GTTGGAACTGCT | Thermo- | 9a |
| | | | agtatcaccaGT | taatttaaca | CTCATTTTGGAGG | nuclease | |
| | | | TGGAACTGCTCTCATTTTG | gtatcacca | GTAATCACAAC | | |
| | | | GAGGGTAATCACAAC | | | | |
| 9a | thermo_1 | CcaCas13b | acctttgtacattaatttaa | acctttgtac | GTTGGAACTGCT | Thermo- | 9a |
| | 0 | | cagtatcaccGT | attaatttaac | CTCATTTTGGAGG | nuclease | |
| | | | TGGAACTGCTCTCATTTTG | agtatcacc | GTAATCACAAC | | |
| | | | GAGGGTAATCACAAC | | | | |
| 9a | thermo_1 | CcaCas13b | gacctttgtacattaattta | gacctttgta | GTTGGAACTGCT | Thermo- | 9a |
| | 1 | | acagtatcacGT | cattaatttaa | CTCATTTTGGAGG | nuclease | |
| | | | TGGAACTGCTCTCATTTTG | cagtatcac | GTAATCACAAC | | |
| | | | GAGGGTAATCACAAC | | | | |
| 9a | thermo_1 | CcaCas13b | tgacctttgtacattaattt | tgacctttgta | GTTGGAACTGCT | Thermo- | 9a |
| | 2 | | aacagtatcaGT | cattaatttaa | CTCATTTTGGAGG | nuclease | |
| | | | TGGAACTGCTCTCATTTTG | cagtatca | GTAATCACAAC | | |
| | | | GAGGGTAATCACAAC | | | | |
| 9a | thermo_1 | CcaCas13b | ttgacctttgtacattaatt | ttgacctttgt | GTTGGAACTGCT | Thermo- | 9a |
| | 3 | | taacagtatcGT | acattaattta | CTCATTTTGGAGG | nuclease | |
| | | | TGGAACTGCTCTCATTTTG | acagtatc | GTAATCACAAC | | |
| | | | GAGGGTAATCACAAC | | | | |
| 9a | thermo_1 | CcaCas13b | gttgacctttgtacattaat | gttgacctttg | GTTGGAACTGCT | Thermo- | 9a |
| | 4 | | ttaacagtatGT | tacattaattt | CTCATTTTGGAGG | nuclease | |
| | | | TGGAACTGCTCTCATTTTG | aacagtat | GTAATCACAAC | | |
| | | | GAGGGTAATCACAAC | | | | |
| 9a | thermo_1 | CcaCas13b | ggttgacctttgtacattaa | ggttgaccttt | GTTGGAACTGCT | Thermo- | 9a |
| | 5 | | tttaacagtaGT | CTCATTTTGGAGG | gtacattaatt | nuclease | |
| | | | TGGAACTGCTCTCATTTTG | taacagta | GTAATCACAAC | | |
| | | | GAGGGTAATCACAAC | | | | |
| 9a | thermo_1 | CcaCas13b | tggttgacctttgtacatta | tggttgacctt | GTTGGAACTGCT | Thermo- | 9a |
| | 6 | | atttaacagtGT | tgtacattaat | CTCATTTTGGAGG | nuclease | |
| | | | TGGAACTGCTCTCATTTTG | ttaacagt | GTAATCACAAC | | |
| | | | GAGGGTAATCACAAC | | | | |
| 9a | thermo_1 | CcaCas13b | ttggttgacctttgtacatt | ttggttgacct | GTTGGAACTGCT | Thermo- | 9a |
| | 7 | | aatttaacagGT | ttgtacattaa | CTCATTTTGGAGG | nuclease | |
| | | | TGGAACTGCTCTCATTTTG | tttaacag | GTAATCACAAC | | |
| | | | GAGGGTAATCACAAC | | | | |
| 9a | thermo_1 | CcaCas13b | attggttgacctttgtacat | attggttgac | GTTGGAACTGCT | Thermo- | 9a |
| | 8 | | taatttaacaGT | ctttgtacatt | CTCATTTTGGAGG | nuclease | |
| | | | TGGAACTGCTCTCATTTTG | aatttaaca | GTAATCACAAC | | |
| | | | GAGGGTAATCACAAC | | | | |
| 9a | thermo_1 | CcaCas13b | cattggttgacctttgtaca | cattggttga | GTTGGAACTGCT | Thermo- | 9a |
| | 9 | | ttaatttaacGT | cctttgtacat | CTCATTTTGGAGG | nuclease | |
| | | | TGGAACTGCTCTCATTTTG | taatttaac | GTAATCACAAC | | |
| | | | GAGGGTAATCACAAC | | | | |
| 9a | thermo_2 | CcaCas13b | gtcattggttgacctttgta | gtcattggtt | GTTGGAACTGCT | Thermo- | 9a |
| | 0 | | cattaatttaGTT | gacctttgta | CTCATTTTGGAGG | nuclease | |
| | | | GGAACTGCTCTCATTTTGG | cattaattta | GTAATCACAAC | | |
| | | | AGGGTAATCACAAC | | | | |
| 9a | thermo_2 | CcaCas13b | atgtcattggttgacctttg | atgtcattggt | GTTGGAACTGCT | Thermo- | 9a |
| | 1 | | tacattaattGTT | tgacctttgta | CTCATTTTGGAGG | nuclease | |
| | | | GGAACTGCTCTCATTTTGG | cattaatt | GTAATCACAAC | | |
| | | | AGGGTAATCACAAC | | | | |
| 9a | thermo_2 | CcaCas13b | gaatgtcattggttgacctt | gaatgtcatt | GTTGGAACTGCT | Thermo- | 9a |
| | 2 | | tgtacattaaGT | ggttgaccttt | CTCATTTTGGAGG | nuclease | |
| | | | TGGAACTGCTCTCATTTTG | gtacattaa | GTAATCACAAC | | |
| | | | GAGGGTAATCACAAC | | | | |
| 9a | thermo_2 | CcaCas13b | ctgaatgtcattggttgacc | ctgaatgtca | GTTGGAACTGCT | Thermo- | 9a |
| | 3 | | tttgtacattGT | ttggttgacct | CTCATTTTGGAGG | nuclease | |
| | | | TGGAACTGCTCTCATTTTG | ttgtacatt | GTAATCACAAC | | |
| | | | GAGGGTAATCACAAC | | | | |
| 9a | thermo_2 | CcaCas13b | gtctgaatgtcattggttga | gtctgaatgt | GTTGGAACTGCT | Thermo- | 9a |
| | 4 | | cctttgtacaGT | cattggttga | CTCATTTTGGAGG | nuclease | |
| | | | TGGAACTGCTCTCATTTTG | cctttgtaca | GTAATCACAAC | | |
| | | | GAGGGTAATCACAAC | | | | |
| 9a | thermo_2 | CcaCas13b | tagtctgaatgtcattggtt | tagtctgaat | GTTGGAACTGCT | Thermo- | 9a |
| | 5 | | gacctttgtaGT | gtcattggtt | CTCATTTTGGAGG | nuclease | |
| | | | TGGAACTGCTCTCATTTTG | gacctttgta | GTAATCACAAC | | |
| | | | GAGGGTAATCACAAC | | | | |
| 9a | thermo_2 | CcaCas13b | aatagtctgaatgtcattgg | aatagtctga | GTTGGAACTGCT | Thermo- | 9a |
| | 6 | | ttgacctttgGT | atgtcattggt | CTCATTTTGGAGG | nuclease | |
| | | | TGGAACTGCTCTCATTTTG | tgacctttg | GTAATCACAAC | | |
| | | | GAGGGTAATCACAAC | | | | |
| 9a | thermo_2 | CcaCas13b | ataatagtctgaatgtcatt | ataatagtct | GTTGGAACTGCT | Thermo- | 9a |
| | 7 | | ggttgaccttGT | gaatgtcatt | CTCATTTTGGAGG | nuclease | |
| | | | TGGAACTGCTCTCATTTTG | ggttgacctt | GTAATCACAAC | | |
| | | | GAGGGTAATCACAAC | | | | |
| 9a | thermo_2 | CcaCas13b | caataatagtctgaatgtca | caataatagt | GTTGGAACTGCT | Thermo- | 9a |
| | 8 | | ttggttgaccG | ctgaatgtca | CTCATTTTGGAGG | nuclease | |
| | | | TTGGAACTGCTCTCATTTTG | ttggttgacc | GTAATCACAAC | | |
| | | | GAGGGTAATCACAAC | | | | |
| 9a | thermo_2 | CcaCas13b | accaataatagtctgaatgt | accaataata | GTTGGAACTGCT | Thermo- | 9a |
| | 9 | | cattggttgaG | gtctgaatgt | CTCATTTTGGAGG | nuclease | |
| | | | TTGGAACTGCTCTCATTTTG | cattggttga | GTAATCACAAC | | |
| | | | GAGGGTAATCACAAC | | | | |
| 9a | thermo_3 | CcaCas13b | caaccaataatagtctgaat | caaccaata | GTTGGAACTGCT | Thermo- | 9a |
| | 0 | | gtcattggttG | atagtctgaa | CTCATTTTGGAGG | nuclease | |
| | | | TTGGAACTGCTCTCATTTTG | tgtcattggtt | GTAATCACAAC | | |
| | | | GAGGGTAATCACAAC | | | | |
| 9a | thermo_3 | CcaCas13b | atcaaccaataatagtctga | atcaaccaat | GTTGGAACTGCT | Thermo- | 9a |
| | 1 | | atgtcattggG | aatagtctga | CTCATTTTGGAGG | nuclease | |
| | | | TTGGAACTGCTCTCATTTTG | atgtcattgg | GTAATCACAAC | | |
| | | | GAGGGTAATCACAAC | | | | |
| 9a | thermo_3 | CcaCas13b | gtatcaaccaataatagtct | gtatcaacca | GTTGGAACTGCT | Thermo- | 9a |
| | 2 | | gaatgtcattGT | ataatagtct | CTCATTTTGGAGG | nuclease | |
| | | | TGGAACTGCTCTCATTTTG | gaatgtcatt | GTAATCACAAC | | |
| | | | GAGGGTAATCACAAC | | | | |
| 9a | thermo_3 | CcaCas13b | gtgtatcaaccaataatagt | gtgtatcaac | GTTGGAACTGCT | Thermo- | 9a |
| | 3 | | ctgaatgtcaG | caataatagt | CTCATTTTGGAGG | nuclease | |
| | | | TTGGAACTGCTCTCATTTTG | ctgaatgtca | GTAATCACAAC | | |
| | | | GAGGGTAATCACAAC | | | | |
| 9a | thermo_3 | CcaCas13b | aggtgtatcaaccaataata | aggtgtatca | GTTGGAACTGCT | Thermo- | 9a |
| | 4 | | gtctgaatgtG | accaataata | CTCATTTTGGAGG | nuclease | |
| | | | TTGGAACTGCTCTCATTTTG | gtctgaatgt | GTAATCACAAC | | |
| | | | GAGGGTAATCACAAC | | | | |
| 9a | thermo_3 | CcaCas13b | tcaggtgtatcaaccaataa | tcaggtgtat | GTTGGAACTGCT | Thermo- | 9a |
| | 5 | | tagtctgaatG | caaccaata | CTCATTTTGGAGG | nuclease | |
| | | | TTGGAACTGCTCTCATTTTG | atagtctgaa | GTAATCACAAC | | |
| | | | GAGGGTAATCACAAC | t | | | |
| 9a | thermo_3 | CcaCas13b | tttcaggtgtatcaaccaat | tttcaggtgta | GTTGGAACTGCT | Thermo- | 9a |
| | 6 | | aatagtctgaG | tcaaccaata | CTCATTTTGGAGG | nuclease | |
| | | | TTGGAACTGCTCTCATTTTG | atagtctga | GTAATCACAAC | | |
| | | | GAGGGTAATCACAAC | | | | |
| 9a | thermo_3 | CcaCas13b | tgtttcaggtgtatcaacca | tgtttcaggt | GTTGGAACTGCT | Thermo- | 9a |
| | 7 | | ataatagtctGT | gtatcaacca | CTCATTTTGGAGG | nuclease | |
| | | | TGGAACTGCTCTCATTTTG | ataatagtct | GTAATCACAAC | | |
| | | | GAGGGTAATCACAAC | | | | |
| 9a | thermo_3 | CcaCas13b | tttgtttcaggtgtatcaac | tttgtttcagg | GTTGGAACTGCT | Thermo- | 9a |
| | 8 | | caataatagtGT | tgtatcaacc | CTCATTTTGGAGG | nuclease | |
| | | | TGGAACTGCTCTCATTTTG | aataatagt | GTAATCACAAC | | |
| | | | GAGGGTAATCACAAC | | | | |
| 9a | thermo_3 | CcaCas13b | gctttgtttcaggtgtatca | gctttgtttca | GTTGGAACTGCT | Thermo- | 9a |
| | 9 | | accaataataGT | ggtgtatcaa | CTCATTTTGGAGG | nuclease | |
| | | | TGGAACTGCTCTCATTTTG | ccaataata | GTAATCACAAC | | |
| | | | GAGGGTAATCACAAC | | | | |
| 9a | thermo_4 | CcaCas13b | atgctttgtttcaggtgtat | atgctttgttt | GTTGGAACTGCT | Thermo- | 9a |
| | 0 | | caaccaataaGT | caggtgtatc | CTCATTTTGGAGG | nuclease | |
| | | | TGGAACTGCTCTCATTTTG | aaccaataa | GTAATCACAAC | | |
| | | | GAGGGTAATCACAAC | | | | |
| 9a | thermo_4 | CcaCas13b | ggatgctttgtttcaggtgt | ggatgctttg | GTTGGAACTGCT | Thermo- | 9a |
| | 1 | | atcaaccaatGT | tttcaggtgta | CTCATTTTGGAGG | nuclease | |
| | | | TGGAACTGCTCTCATTTTG | tcaaccaat | GTAATCACAAC | | |
| | | | GAGGGTAATCACAAC | | | | |
| 9a | thermo_4 | CcaCas13b | taggatgctttgtttcaggt | taggatgcttt | GTTGGAACTGCT | Thermo- | 9a |
| | 2 | | gtatcaaccaGT | gtttcaggtg | CTCATTTTGGAGG | nuclease | |
| | | | TGGAACTGCTCTCATTTTG | tatcaacca | GTAATCACAAC | | |
| | | | GAGGGTAATCACAAC | | | | |
| 9a | thermo_4 | CcaCas13b | tttaggatgctttgtttcag | tttaggatgct | GTTGGAACTGCT | Thermo- | 9a |
| | 3 | | gtgtatcaacGT | ttgtttcaggt | CTCATTTTGGAGG | nuclease | |
| | | | TGGAACTGCTCTCATTTTG | gtatcaac | GTAATCACAAC | | |
| | | | GAGGGTAATCACAAC | | | | |
| 9a | thermo_4 | CcaCas13b | tttttaggatgctttgtttc | tttttaggatg | GTTGGAACTGCT | Thermo- | 9a |
| | 4 | | aggtgtatcaGTT | ctttgtttcag | CTCATTTTGGAGG | nuclease | |
| | | | GGAACTGCTCTCATTTTGG | gtgtatca | GTAATCACAAC | | |
| | | | AGGGTAATCACAAC | | | | |
| 9a | thermo_4 | CcaCas13b | cttttttaggatgctttgtt | cttttttagga | GTTGGAACTGCT | Thermo- | 9a |
| | 5 | | tcaggtgtatGTT | tgctttgtttc | CTCATTTTGGAGG | nuclease | |
| | | | GGAACTGCTCTCATTTTGG | aggtgtat | GTAATCACAAC | | |
| | | | AGGGTAATCACAAC | | | | |
| 9a | thermo_4 | CcaCas13b | accttttttaggatgctttg | accttttttag | GTTGGAACTGCT | Thermo- | 9a |
| | 6 | | tttcaggtgtGTT | gatgctttgtt | CTCATTTTGGAGG | nuclease | |
| | | | GGAACTGCTCTCATTTTGG | tcaggtgt | GTAATCACAAC | | |
| | | | AGGGTAATCACAAC | | | | |
| 9a | thermo_4 | CcaCas13b | acaccttttttaggatgctt | acacctttttt | GTTGGAACTGCT | Thermo- | 9a |
| | 7 | | tgtttcaggtGT | aggatgcttt | CTCATTTTGGAGG | nuclease | |
| | | | TGGAACTGCTCTCATTTTG | gtttcaggt | GTAATCACAAC | | |
| | | | GAGGGTAATCACAAC | | | | |
| 9a | thermo_4 | CcaCas13b | ctacaccttttttaggatgc | ctacacctttt | GTTGGAACTGCT | Thermo- | 9a |
| | 8 | | tttgtttcagGTT | ttaggatgctt | CTCATTTTGGAGG | nuclease | |
| | | | GGAACTGCTCTCATTTTGG | tgtttcag | GTAATCACAAC | | |
| | | | AGGGTAATCACAAC | | | | |
| 9a | thermo_4 | CcaCas13b | ctctacaccttttttaggat | ctctacacctt | GTTGGAACTGCT | Thermo- | 9a |
| | 9 | | gctttgtttcGTT | ttttaggatgc | CTCATTTTGGAGG | nuclease | |
| | | | GGAACTGCTCTCATTTTGG | tttgtttc | GTAATCACAAC | | |
| | | | AGGGTAATCACAAC | | | | |
| 9a | thermo_5 | CcaCas13b | ttctctacaccttttttagg | ttctctacacc | GTTGGAACTGCT | Thermo- | 9a |
| | 0 | | atgctttgttGTT | ttttttaggat | CTCATTTTGGAGG | nuclease | |
| | | | GGAACTGCTCTCATTTTGG | gctttgtt | GTAATCACAAC | | |
| | | | AGGGTAATCACAAC | | | | |
| 9a | thermo_5 | CcaCas13b | atttctctacacctttttta | atttctctaca | GTTGGAACTGCT | Thermo- | 9a |
| | 1 | | ggatgctttgGTT | ccttttttagg | CTCATTTTGGAGG | nuclease | |
| | | | GGAACTGCTCTCATTTTGG | atgctttg | GTAATCACAAC | | |
| | | | AGGGTAATCACAAC | | | | |
| 9a | thermo_5 | CcaCas13b | atatttctctacaccttttt | atatttctcta | GTTGGAACTGCT | Thermo- | 9a |
| | 2 | | taggatgcttGTT | cacctttttta | CTCATTTTGGAGG | nuclease | |
| | | | GGAACTGCTCTCATTTTGG | ggatgctt | GTAATCACAAC | | |
| | | | AGGGTAATCACAAC | | | | |
| 9a | thermo_5 | CcaCas13b | ccatatttctctacaccttt | ccatatttctc | GTTGGAACTGCT | Thermo- | 9a |
| | 3 | | tttaggatgcGT | tacacctttttt | CTCATTTTGGAGG | nuclease | |
| | | | TGGAACTGCTCTCATTTTG | aggatgc | GTAATCACAAC | | |
| | | | GAGGGTAATCACAAC | | | | |
| 9a | thermo_5 | CcaCas13b | gaccatatttctctacacct | gaccatattt | GTTGGAACTGCT | Thermo- | 9a |
| | 4 | | tttttaggatGT | ctctacacctt | CTCATTTTGGAGG | nuclease | |
| | | | TGGAACTGCTCTCATTTTG | ttttaggat | GTAATCACAAC | | |
| | | | GAGGGTAATCACAAC | | | | |
| 9a | thermo_5 | CcaCas13b | aggaccatatttctctacac | aggaccatat | GTTGGAACTGCT | Thermo- | 9a |
| | 5 | | cttttttaggGT | ttctctacacc | CTCATTTTGGAGG | nuclease | |
| | | | TGGAACTGCTCTCATTTTG | ttttttagg | GTAATCACAAC | | |
| | | | GAGGGTAATCACAAC | | | | |
| 9a | thermo_5 | CcaCas13b | tcaggaccatatttctctac | tcaggaccat | GTTGGAACTGCT | Thermo- | 9a |
| | 6 | | accttttttaGTT | atttctctaca | CTCATTTTGGAGG | nuclease | |
| | | | GGAACTGCTCTCATTTTGG | cctttttta | GTAATCACAAC | | |
| | | | AGGGTAATCACAAC | | | | |
| 9a | thermo_5 | CcaCas13b | cttcaggaccatatttctct | cttcaggacc | GTTGGAACTGCT | Thermo- | 9a |
| | 7 | | acacctttttGTT | atatttctcta | CTCATTTTGGAGG | nuclease | |
| | | | GGAACTGCTCTCATTTTGG | caccttttt | GTAATCACAAC | | |
| | | | AGGGTAATCACAAC | | | | |
| 9a | thermo_5 | CcaCas13b | tgcttcaggaccatatttct | tgcttcagga | GTTGGAACTGCT | Thermo- | 9a |
| | 8 | | ctacacctttGT | ccatatttctc | CTCATTTTGGAGG | nuclease | |
| | | | TGGAACTGCTCTCATTTTG | tacaccttt | GTAATCACAAC | | |
| | | | GAGGGTAATCACAAC | | | | |
| 9a | thermo_5 | CcaCas13b | cttgcttcaggaccatattt | cttgcttcag | GTTGGAACTGCT | Thermo- | 9a |
| | 9 | | ctctacacctGT | gaccatattt | CTCATTTTGGAGG | nuclease | |
| | | | TGGAACTGCTCTCATTTTG | ctctacacct | GTAATCACAAC | | |
| | | | GAGGGTAATCACAAC | | | | |
| 9a | thermo_6 | CcaCas13b | cacttgcttcaggaccatat | cacttgcttc | GTTGGAACTGCT | Thermo- | 9a |
| | 0 | | ttctctacacGT | aggaccatat | CTCATTTTGGAGG | nuclease | |
| | | | TGGAACTGCTCTCATTTTG | ttctctacac | GTAATCACAAC | | |
| | | | GAGGGTAATCACAAC | | | | |
| 9a | thermo_6 | CcaCas13b | tgcacttgcttcaggaccat | tgcacttgctt | GTTGGAACTGCT | Thermo- | 9a |
| | 1 | | atttctctacGT | caggaccat | CTCATTTTGGAGG | nuclease | |
| | | | TGGAACTGCTCTCATTTTG | atttctctac | GTAATCACAAC | | |
| | | | GAGGGTAATCACAAC | | | | |
| 9a | thermo_6 | CcaCas13b | aatgcacttgcttcaggacc | aatgcacttg | GTTGGAACTGCT | Thermo- | 9a |
| | 2 | | atatttctctGT | cttcaggacc | CTCATTTTGGAGG | nuclease | |
| | | | TGGAACTGCTCTCATTTTG | atatttctct | GTAATCACAAC | | |
| | | | GAGGGTAATCACAAC | | | | |
| 9a | thermo_6 | CcaCas13b | taaatgcacttgcttcagga | taaatgcact | GTTGGAACTGCT | Thermo- | 9a |
| | 3 | | ccatatttctGT | tgcttcagga | CTCATTTTGGAGG | nuclease | |
| | | | TGGAACTGCTCTCATTTTG | | | | |
| | | | GAGGGTAATCACAAC | ccatatttct | GTAATCACAAC | | |
| 9a | thermo_6 | CcaCas13b | cgtaaatgcacttgcttcag | cgtaaatgca | GTTGGAACTGCT | Thermo- | 9a |
| | 4 | | gaccatatttG | cttgcttcag | CTCATTTTGGAGG | nuclease | |
| | | | TTGGAACTGCTCTCATTTTG | gaccatattt | GTAATCACAAC | | |
| | | | GAGGGTAATCACAAC | | | | |
| 9a | thermo_6 | CcaCas13b | tcgtaaatgcacttgcttca | tcgtaaatgc | GTTGGAACTGCT | Thermo- | 9a |
| | 5 | | ggaccatattG | acttgcttca | CTCATTTTGGAGG | nuclease | |
| | | | TTGGAACTGCTCTCATTTTG | ggaccatatt | GTAATCACAAC | | |
| | | | GAGGGTAATCACAAC | | | | |
| 9a | thermo_6 | CcaCas13b | ttcgtaaatgcacttgcttc | ttcgtaaatg | GTTGGAACTGCT | Thermo- | 9a |
| | 6 | | aggaccatatG | cacttgcttc | CTCATTTTGGAGG | nuclease | |
| | | | TTGGAACTGCTCTCATTTTG | aggaccatat | GTAATCACAAC | | |
| | | | GAGGGTAATCACAAC | | | | |
| 9a | thermo_6 | CcaCas13b | tttcgtaaatgcacttgctt | tttcgtaaatg | GTTGGAACTGCT | Thermo- | 9a |
| | 7 | | caggaccataG | cacttgcttc | CTCATTTTGGAGG | nuclease | |
| | | | TTGGAACTGCTCTCATTTTG | aggaccata | GTAATCACAAC | | |
| | | | GAGGGTAATCACAAC | | | | |
| 9a | thermo_6 | CcaCas13b | ttttcgtaaatgcacttgct | ttttcgtaaat | GTTGGAACTGCT | Thermo- | 9a |
| | 8 | | tcaggaccatGT | gcacttgctt | CTCATTTTGGAGG | nuclease | |
| | | | TGGAACTGCTCTCATTTTG | caggaccat | GTAATCACAAC | | |
| | | | GAGGGTAATCACAAC | | | | |
| 9a | thermo_6 | CcaCas13b | tttttcgtaaatgcacttgc | tttttcgtaaat | GTTGGAACTGCT | Thermo- | 9a |
| | 9 | | ttcaggaccaGT | gcacttgctt | CTCATTTTGGAGG | nuclease | |
| | | | TGGAACTGCTCTCATTTTG | caggacca | GTAATCACAAC | | |
| | | | GAGGGTAATCACAAC | | | | |
| 9a | thermo_7 | CcaCas13b | ctttttcgtaaatgcacttg | ctttttcgtaa | GTTGGAACTGCT | Thermo- | 9a |
| | 0 | | cttcaggaccGT | atgcacttgc | CTCATTTTGGAGG | nuclease | |
| | | | TGGAACTGCTCTCATTTTG | ttcaggacc | GTAATCACAAC | | |
| | | | GAGGGTAATCACAAC | | | | |
| 9a | thermo_7 | CcaCas13b | tctttttcgtaaatgcactt | tctttttcgtaa | GTTGGAACTGCT | Thermo- | 9a |
| | 1 | | gcttcaggacGT | atgcacttgc | CTCATTTTGGAGG | nuclease | |
| | | | TGGAACTGCTCTCATTTTG | ttcaggac | GTAATCACAAC | | |
| | | | GAGGGTAATCACAAC | | | | |
| 9a | thermo_7 | CcaCas13b | atctttttcgtaaatgcact | atctttttcgta | GTTGGAACTGCT | Thermo- | 9a |
| | 2 | | tgcttcaggaGT | aatgcacttg | CTCATTTTGGAGG | nuclease | |
| | | | TGGAACTGCTCTCATTTTG | cttcagga | GTAATCACAAC | | |
| | | | GAGGGTAATCACAAC | | | | |
| 9a | thermo_7 | CcaCas13b | catctttttcgtaaatgcac | catctttttcgt | GTTGGAACTGCT | Thermo- | 9a |
| | 3 | | ttgcttcaggGT | aaatgcactt | CTCATTTTGGAGG | nuclease | |
| | | | TGGAACTGCTCTCATTTTG | gcttcagg | GTAATCACAAC | | |
| | | | GAGGGTAATCACAAC | | | | |
| 9a | thermo_7 | CcaCas13b | ccatctttttcgtaaatgca | ccatctttttc | GTTGGAACTGCT | Thermo- | 9a |
| | 4 | | cttgcttcagGT | gtaaatgcac | CTCATTTTGGAGG | nuclease | |
| | | | TGGAACTGCTCTCATTTTG | ttgcttcag | GTAATCACAAC | | |
| | | | GAGGGTAATCACAAC | | | | |
| 9a | thermo_7 | CcaCas13b | accatctttttcgtaaatgc | accatcttttt | GTTGGAACTGCT | Thermo- | 9a |
| | 5 | | acttgcttcaGT | cgtaaatgca | CTCATTTTGGAGG | nuclease | |
| | | | TGGAACTGCTCTCATTTTG | cttgcttca | GTAATCACAAC | | |
| | | | GAGGGTAATCACAAC | | | | |
| 9a | thermo_7 | CcaCas13b | taccatctttttcgtaaatg | taccatcttttt | GTTGGAACTGCT | Thermo- | 9a |
| | 6 | | cacttgcttcGT | cgtaaatgca | CTCATTTTGGAGG | nuclease | |
| | | | TGGAACTGCTCTCATTTTG | cttgcttc | GTAATCACAAC | | |
| | | | GAGGGTAATCACAAC | | | | |
| 9a | thermo_7 | CcaCas13b | ctaccatctttttcgtaaat | ctaccatcttt | GTTGGAACTGCT | Thermo- | 9a |
| | 7 | | gcacttgcttGT | ttcgtaaatg | CTCATTTTGGAGG | nuclease | |
| | | | TGGAACTGCTCTCATTTTG | cacttgctt | GTAATCACAAC | | |
| | | | GAGGGTAATCACAAC | | | | |
| 9a | thermo_7 | CcaCas13b | tctaccatctttttcgtaaa | tctaccatctt | GTTGGAACTGCT | Thermo- | 9a |
| | 8 | | tgcacttgctGT | tttcgtaaatg | CTCATTTTGGAGG | nuclease | |
| | | | TGGAACTGCTCTCATTTTG | cacttgct | GTAATCACAAC | | |
| | | | GAGGGTAATCACAAC | | | | |
| 9a | thermo_7 | CcaCas13b | ttctaccatctttttcgtaa | ttctaccatct | GTTGGAACTGCT | Thermo- | 9a |
| | 9 | | atgcacttgcGT | ttttcgtaaat | CTCATTTTGGAGG | nuclease | |
| | | | TGGAACTGCTCTCATTTTG | gcacttgc | GTAATCACAAC | | |
| | | | GAGGGTAATCACAAC | | | | |
| 9a | thermo_8 | CcaCas13b | tttctaccatctttttcgta | tttctaccatc | GTTGGAACTGCT | Thermo- | 9a |
| | 0 | | aatgcacttgGTT | tttttcgtaaat | CTCATTTTGGAGG | nuclease | |
| | | | GGAACTGCTCTCATTTTGG | gcacttg | GTAATCACAAC | | |
| | | | AGGGTAATCACAAC | | | | |
| 9a | thermo_8 | CcaCas13b | ttttctaccatctttttcgt | ttttctaccat | GTTGGAACTGCT | Thermo- | 9a |
| | 1 | | aaatgcacttGTT | ctttttcgtaa | CTCATTTTGGAGG | nuclease | |
| | | | GGAACTGCTCTCATTTTGG | atgcactt | GTAATCACAAC | | |
| | | | AGGGTAATCACAAC | | | | |
| 9a | thermo_8 | CcaCas13b | attttctaccatctttttcg | attttctacca | GTTGGAACTGCT | Thermo- | 9a |
| | 2 | | taaatgcactGTT | tctttttcgtaa | CTCATTTTGGAGG | nuclease | |
| | | | GGAACTGCTCTCATTTTGG | atgcact | GTAATCACAAC | | |
| | | | AGGGTAATCACAAC | | | | |
| 9a | thermo_8 | CcaCas13b | cattttctaccatctttttc | cattttctacc | GTTGGAACTGCT | Thermo- | 9a |
| | 3 | | gtaaatgcacGTT | atctttttcgta | CTCATTTTGGAGG | nuclease | |
| | | | GGAACTGCTCTCATTTTGG | aatgcac | GTAATCACAAC | | |
| | | | AGGGTAATCACAAC | | | | |
| 9a | thermo_8 | CcaCas13b | gcattttctaccatcttttt | gcattttctac | GTTGGAACTGCT | Thermo- | 9a |
| | 4 | | cgtaaatgcaGT | catctttttcgt | CTCATTTTGGAGG | nuclease | |
| | | | TGGAACTGCTCTCATTTTG | aaatgca | GTAATCACAAC | | |
| | | | GAGGGTAATCACAAC | | | | |
| 9a | thermo_8 | CcaCas13b | tgcattttctaccatctttt | tgcattttcta | GTTGGAACTGCT | Thermo- | 9a |
| | 5 | | tcgtaaatgcGTT | ccatctttttc | CTCATTTTGGAGG | nuclease | |
| | | | GGAACTGCTCTCATTTTGG | gtaaatgc | GTAATCACAAC | | |
| | | | AGGGTAATCACAAC | | | | |
| 9a | thermo_8 | CcaCas13b | ttgcattttctaccatcttt | ttgcattttcta | GTTGGAACTGCT | Thermo- | 9a |
| | 6 | | ttcgtaaatgGTT | ccatctttttc | CTCATTTTGGAGG | nuclease | |
| | | | GGAACTGCTCTCATTTTGG | gtaaatg | GTAATCACAAC | | |
| | | | AGGGTAATCACAAC | | | | |
| 9a | thermo_8 | CcaCas13b | tttgcattttctaccatctt | tttgcattttct | GTTGGAACTGCT | Thermo- | 9a |
| | 7 | | tttcgtaaatGTT | accatcttttt | CTCATTTTGGAGG | nuclease | |
| | | | GGAACTGCTCTCATTTTGG | cgtaaat | GTAATCACAAC | | |
| | | | AGGGTAATCACAAC | | | | |
| 9a | thermo_8 | CcaCas13b | ctttgcattttctaccatct | ctttgcattttc | GTTGGAACTGCT | Thermo- | 9a |
| | 8 | | ttttcgtaaaGTT | taccatcttttt | CTCATTTTGGAGG | nuclease | |
| | | | GGAACTGCTCTCATTTTGG | cgtaaa | GTAATCACAAC | | |
| | | | AGGGTAATCACAAC | | | | |
| 9a | thermo_8 | CcaCas13b | tctttgcattttctaccatc | tctttgcatttt | GTTGGAACTGCT | Thermo- | 9a |
| | 9 | | tttttcgtaaGTT | ctaccatcttt | CTCATTTTGGAGG | nuclease | |
| | | | GGAACTGCTCTCATTTTGG | ttcgtaa | GTAATCACAAC | | |
| | | | AGGGTAATCACAAC | | | | |
| 9a | thermo_9 | CcaCas13b | ttctttgcattttctaccat | ttctttgcattt | GTTGGAACTGCT | Thermo- | 9a |
| | 0 | | ctttttcgtaGTT | tctaccatctt | CTCATTTTGGAGG | nuclease | |
| | | | GGAACTGCTCTCATTTTGG | tttcgta | GTAATCACAAC | | |
| | | | AGGGTAATCACAAC | | | | |
| 9a | thermo_9 | CcaCas13b | tttctttgcattttctacca | tttctttgcatt | GTTGGAACTGCT | Thermo- | 9a |
| | 1 | | tctttttcgtGTTG | ttctaccatct | CTCATTTTGGAGG | nuclease | |
| | | | GAACTGCTCTCATTTTGGA | ttttcgt | GTAATCACAAC | | |
| | | | GGGTAATCACAAC | | | | |
| 9a | thermo_9 | CcaCas13b | ttttctttgcattttctacc | ttttctttgcat | GTTGGAACTGCT | Thermo- | 9a |
| | 2 | | atctttttcgGTTG | tttctaccatc | CTCATTTTGGAGG | nuclease | |
| | | | GAACTGCTCTCATTTTGGA | tttttcg | GTAATCACAAC | | |
| | | | GGGTAATCACAAC | | | | |
| 9a | thermo_9 | CcaCas13b | attttctttgcattttctac | attttctttgca | GTTGGAACTGCT | Thermo- | 9a |
| | 3 | | catctttttcGTTG | ttttctaccat | CTCATTTTGGAGG | nuclease | |
| | | | GAACTGCTCTCATTTTGGA | ctttttc | GTAATCACAAC | | |
| | | | GGGTAATCACAAC | | | | |
| 9a | thermo_9 | CcaCas13b | aattttctttgcattttcta | aattttctttgc | GTTGGAACTGCT | Thermo- | 9a |
| | 4 | | ccatctttttGTTG | attttctacca | CTCATTTTGGAGG | nuclease | |
| | | | GAACTGCTCTCATTTTGGA | tcttttt | GTAATCACAAC | | |
| | | | GGGTAATCACAAC | | | | |
| 9a | thermo_9 | CcaCas13b | caattttctttgcattttct | caattttctttg | GTTGGAACTGCT | Thermo- | 9a |
| | 5 | | accatcttttGTTG | cattttctacc | CTCATTTTGGAGG | nuclease | |
| | | | GAACTGCTCTCATTTTGGA | atctttt | GTAATCACAAC | | |
| | | | GGGTAATCACAAC | | | | |
| 9a | ssrna1_0 | CcaCas13b | atccccgggtaccgagctcg | atccccggg | GTTGGAACTGCT | ssRNA1 | 9a |
| | | | aattcactgg | taccgagctc | CTCATTTTGGAGG | | |
| | | | GTTGGAACTGCTCTCATTTT | gaattcactg | GTAATCACAAC | | |
| | | | GGAGGGTAATCACAAC | g | | | |
| 9a | ssrna1_1 | CcaCas13b | gatccccgggtaccgagctc | gatccccgg | GTTGGAACTGCT | ssRNA1 | 9a |
| | | | gaattcactg | gtaccgagc | CTCATTTTGGAGG | | |
| | | | GTTGGAACTGCTCTCATTTT | tcgaattcac | GTAATCACAAC | | |
| | | | GGAGGGTAATCACAAC | tg | | | |
| 9a | ssrna1_2 | CcaCas13b | ggatccccgggtaccgagct | ggatccccg | GTTGGAACTGCT | ssRNA1 | 9a |
| | | | cgaattcact | ggtaccgag | CTCATTTTGGAGG | | |
| | | | GTTGGAACTGCTCTCATTTT | ctcgaattca | GTAATCACAAC | | |
| | | | GGAGGGTAATCACAAC | ct | | | |
| 9a | ssrna1_3 | CcaCas13b | agaggatccccgggtaccga | agaggatcc | GTTGGAACTGCT | ssRNA1 | 9a |
| | | | gctcgaattc | ccgggtacc | CTCATTTTGGAGG | | |
| | | | GTTGGAACTGCTCTCATTTT | gagctcgaa | GTAATCACAAC | | |
| | | | GGAGGGTAATCACAAC | ttc | | | |
| 9a | ssrna1_4 | CcaCas13b | ctagaggatccccgggtacc | ctagaggat | GTTGGAACTGCT | ssRNA1 | 9a |
| | | | gagctcgaat | ccccgggta | CTCATTTTGGAGG | | |
| | | | GTTGGAACTGCTCTCATTTT | ccgagctcg | GTAATCACAAC | | |
| | | | GGAGGGTAATCACAAC | aat | | | |
| 9a | ssrna1_5 | CcaCas13b | tttctagaggatccccgggt | tttctagagg | GTTGGAACTGCT | ssRNA1 | 9a |
| | | | accgagctcg | atccccggg | CTCATTTTGGAGG | | |
| | | | GTTGGAACTGCTCTCATTTT | taccgagctc | GTAATCACAAC | | |
| | | | GGAGGGTAATCACAAC | g | | | |
| 9a | ssrna1_6 | CcaCas13b | atttctagaggatccccggg | atttctagag | GTTGGAACTGCT | ssRNA1 | 9a |
| | | | taccgagctc | gatccccgg | CTCATTTTGGAGG | | |
| | | | GTTGGAACTGCTCTCATTTT | gtaccgagc | GTAATCACAAC | | |
| | | | GGAGGGTAATCACAAC | tc | | | |
| 9a | ssrna1_7 | CcaCas13b | atatttctagaggatccccg | atatttctaga | GTTGGAACTGCT | ssRNA1 | 9a |
| | | | ggtaccgagc | ggatccccg | CTCATTTTGGAGG | | |
| | | | GTTGGAACTGCTCTCATTTT | ggtaccgag | GTAATCACAAC | | |
| | | | GGAGGGTAATCACAAC | c | | | |
| 9a | ssrna1_8 | CcaCas13b | catatttctagaggatcccc | catatttctag | GTTGGAACTGCT | ssRNA1 | 9a |
| | | | gggtaccgag | aggatcccc | CTCATTTTGGAGG | | |
| | | | GTTGGAACTGCTCTCATTTT | gggtaccga | GTAATCACAAC | | |
| | | | GGAGGGTAATCACAAC | g | | | |
| 9a | ssrna1_9 | CcaCas13b | atccatatttctagaggatc | atccatatttc | GTTGGAACTGCT | ssRNA1 | 9a |
| | | | cccgggtaccG | tagaggatc | CTCATTTTGGAGG | | |
| | | | TTGGAACTGCTCTCATTTTG | cccgggtac | GTAATCACAAC | | |
| | | | GAGGGTAATCACAAC | c | | | |
| 9a | ssrna1_10 | CcaCas13b | aatccatatttctagaggat | aatccatattt | GTTGGAACTGCT | ssRNA1 | 9a |
| | | | ccccgggtacG | ctagaggat | CTCATTTTGGAGG | | |
| | | | TTGGAACTGCTCTCATTTTG | ccccgggta | GTAATCACAAC | | |
| | | | GAGGGTAATCACAAC | c | | | |
| 9a | ssrna1_11 | CcaCas13b | taatccatatttctagagga | taatccatatt | GTTGGAACTGCT | ssRNA1 | 9a |
| | | | tccccgggtaG | tctagaggat | CTCATTTTGGAGG | | |
| | | | TTGGAACTGCTCTCATTTTG | ccccgggta | GTAATCACAAC | | |
| | | | GAGGGTAATCACAAC | | | | |
| 9a | ssrna1_12 | CcaCas13b | agtaatccatatttctagag | agtaatccat | GTTGGAACTGCT | ssRNA1 | 9a |
| | | | gatccccgggG | atttctagag | CTCATTTTGGAGG | | |
| | | | TTGGAACTGCTCTCATTTTG | gatccccgg | GTAATCACAAC | | |
| | | | GAGGGTAATCACAAC | g | | | |
| 9a | ssrna1_13 | CcaCas13b | aagtaatccatatttctaga | aagtaatcca | GTTGGAACTGCT | ssRNA1 | 9a |
| | | | ggatccccggG | tatttctagag | CTCATTTTGGAGG | | |
| | | | TTGGAACTGCTCTCATTTTG | gatccccgg | GTAATCACAAC | | |
| | | | GAGGGTAATCACAAC | | | | |
| 9a | ssrna1_14 | CcaCas13b | tctaccaagtaatccatatt | tctaccaagt | GTTGGAACTGCT | ssRNA1 | 9a |
| | | | tctagaggatGT | aatccatattt | CTCATTTTGGAGG | | |
| | | | TGGAACTGCTCTCATTTTG | ctagaggat | GTAATCACAAC | | |
| | | | GAGGGTAATCACAAC | | | | |
| 9a | ssrna1_15 | CcaCas13b | gttctaccaagtaatccata | gttctaccaa | GTTGGAACTGCT | ssRNA1 | 9a |
| | | | tttctagaggG | gtaatccata | CTCATTTTGGAGG | | |
| | | | TTGGAACTGCTCTCATTTTG | tttctagagg | GTAATCACAAC | | |
| | | | GAGGGTAATCACAAC | | | | |
| 9a | ssrna1_16 | CcaCas13b | ctgttctaccaagtaatcca | ctgttctacc | GTTGGAACTGCT | ssRNA1 | 9a |
| | | | tatttctagaGT | aagtaatcca | CTCATTTTGGAGG | | |
| | | | TGGAACTGCTCTCATTTTG | tatttctaga | GTAATCACAAC | | |
| | | | GAGGGTAATCACAAC | | | | |
| 9a | ssrna1_17 | CcaCas13b | ttgctgttctaccaagtaat | ttgctgttcta | GTTGGAACTGCT | ssRNA1 | 9a |
| | | | ccatatttctGT | ccaagtaatc | CTCATTTTGGAGG | | |
| | | | TGGAACTGCTCTCATTTTG | catatttct | GTAATCACAAC | | |
| | | | GAGGGTAATCACAAC | | | | |
| 9a | ssrna1_18 | CcaCas13b | gattgctgttctaccaagta | gattgctgttc | GTTGGAACTGCT | ssRNA1 | 9a |
| | | | atccatatttGT | taccaagtaa | CTCATTTTGGAGG | | |
| | | | TGGAACTGCTCTCATTTTG | tccatattt | GTAATCACAAC | | |
| | | | GAGGGTAATCACAAC | | | | |
| 9a | ssrna1_19 | CcaCas13b | agattgctgttctaccaagt | agattgctgtt | GTTGGAACTGCT | ssRNA1 | 9a |
| | | | aatccatattGT | ctaccaagta | CTCATTTTGGAGG | | |
| | | | TGGAACTGCTCTCATTTTG | atccatatt | GTAATCACAAC | | |
| | | | GAGGGTAATCACAAC | | | | |
| 9a | ssrna1_20 | CcaCas13b | agtagattgctgttctacca | agtagattgc | GTTGGAACTGCT | ssRNA1 | 9a |
| | | | agtaatccatG | tgttctacca | CTCATTTTGGAGG | | |
| | | | TTGGAACTGCTCTCATTTTG | agtaatccat | GTAATCACAAC | | |
| | | | GAGGGTAATCACAAC | | | | |
| 9a | ssrna1_21 | CcaCas13b | gagtagattgctgttctacc | gagtagattg | GTTGGAACTGCT | ssRNA1 | 9a |
| | | | aagtaatccaG | ctgttctacc | CTCATTTTGGAGG | | |
| | | | TTGGAACTGCTCTCATTTTG | aagtaatcca | GTAATCACAAC | | |
| | | | GAGGGTAATCACAAC | | | | |
| 9a | ssrna1_22 | CcaCas13b | cgagtagattgctgttctac | cgagtagatt | GTTGGAACTGCT | ssRNA1 | 9a |
| | | | caagtaatccG | gctgttctac | CTCATTTTGGAGG | | |
| | | | TTGGAACTGCTCTCATTTTG | caagtaatcc | GTAATCACAAC | | |
| | | | GAGGGTAATCACAAC | | | | |
| 9a | ssrna1_23 | CcaCas13b | tcgagtagattgctgttcta | tcgagtagat | GTTGGAACTGCT | ssRNA1 | 9a |
| | | | ccaagtaatcG | tgctgttctac | CTCATTTTGGAGG | | |
| | | | TTGGAACTGCTCTCATTTTG | caagtaatc | GTAATCACAAC | | |
| | | | GAGGGTAATCACAAC | | | | |
| 9a | ssrna1_24 | CcaCas13b | ggtcgagtagattgctgttc | ggtcgagta | GTTGGAACTGCT | ssRNA1 | 9a |
| | | | taccaagtaaG | gattgctgttc | CTCATTTTGGAGG | | |
| | | | TTGGAACTGCTCTCATTTTG | taccaagtaa | GTAATCACAAC | | |
| | | | GAGGGTAATCACAAC | | | | |
| 9a | ssrna1_25 | CcaCas13b | aggtcgagtagattgctgtt | aggtcgagt | GTTGGAACTGCT | ssRNA1 | 9a |
| | | | ctaccaagtaG | agattgctgtt | CTCATTTTGGAGG | | |
| | | | TTGGAACTGCTCTCATTTTG | ctaccaagta | GTAATCACAAC | | |
| | | | GAGGGTAATCACAAC | | | | |
| 9a | ssrna1_26 | CcaCas13b | gcaggtcgagtagattgctg | gcaggtcga | GTTGGAACTGCT | ssRNA1 | 9a |
| | | | ttctaccaagG | gtagattgct | CTCATTTTGGAGG | | |
| | | | TTGGAACTGCTCTCATTTTG | gttctaccaa | GTAATCACAAC | | |
| | | | GAGGGTAATCACAAC | g | | | |
| 9a | ssrna1_27 | CcaCas13b | tgcaggtcgagtagattgct | tgcaggtcg | GTTGGAACTGCT | ssRNA1 | 9a |
| | | | gttctaccaaG | agtagattgc | CTCATTTTGGAGG | | |
| | | | TTGGAACTGCTCTCATTTTG | tgttctacca | GTAATCACAAC | | |
| | | | GAGGGTAATCACAAC | a | | | |
| 9a | ssrna1_28 | CcaCas13b | ctgcaggtcgagtagattgc | ctgcaggtc | GTTGGAACTGCT | ssRNA1 | 9a |
| | | | tgttctaccaG | gagtagattg | CTCATTTTGGAGG | | |
| | | | TTGGAACTGCTCTCATTTTG | ctgttctacc | GTAATCACAAC | | |
| | | | GAGGGTAATCACAAC | a | | | |
| 9a | ssrna1_29 | CcaCas13b | cctgcaggtcgagtagattg | cctgcaggt | GTTGGAACTGCT | ssRNA1 | 9a |
| | | | ctgttctaccG | cgagtagatt | CTCATTTTGGAGG | | |
| | | | TTGGAACTGCTCTCATTTTG | gctgttctac | GTAATCACAAC | | |
| | | | GAGGGTAATCACAAC | c | | | |
| 9a | ssrna1_30 | CcaCas13b | gcctgcaggtcgagtagatt | gcctgcagg | GTTGGAACTGCT | ssRNA1 | 9a |
| | | | gctgttctacG | tcgagtagat | CTCATTTTGGAGG | | |
| | | | TTGGAACTGCTCTCATTTTG | tgctgttctac | GTAATCACAAC | | |
| | | | GAGGGTAATCACAAC | | | | |
| 9a | ssrna1_31 | CcaCas13b | tgcctgcaggtcgagtagat | tgcctgcag | GTTGGAACTGCT | ssRNA1 | 9a |
| | | | tgctgttctaG | gtcgagtag | CTCATTTTGGAGG | | |
| | | | TTGGAACTGCTCTCATTTTG | attgctgttct | GTAATCACAAC | | |
| | | | GAGGGTAATCACAAC | a | | | |
| 9a | ssrna1_32 | CcaCas13b | catgcctgcaggtcgagtag | catgcctgca | GTTGGAACTGCT | ssRNA1 | 9a |
| | | | attgctgttcG | ggtcgagta | CTCATTTTGGAGG | | |
| | | | TTGGAACTGCTCTCATTTTG | gattgctgttc | GTAATCACAAC | | |
| | | | GAGGGTAATCACAAC | | | | |
| 9a | ssrna1_33 | CcaCas13b | gcatgcctgcaggtcgagta | gcatgcctg | GTTGGAACTGCT | ssRNA1 | 9a |
| | | | gattgctgttG | caggtcgag | CTCATTTTGGAGG | | |
| | | | TTGGAACTGCTCTCATTTTG | tagattgctgt | GTAATCACAAC | | |
| | | | GAGGGTAATCACAAC | t | | | |
| 9a | ssrna1_34 | CcaCas13b | tgcatgcctgcaggtcgagt | tgcatgcctg | GTTGGAACTGCT | ssRNA1 | 9a |
| | | | agattgctgtG | caggtcgag | CTCATTTTGGAGG | | |
| | | | TTGGAACTGCTCTCATTTTG | tagattgctgt | GTAATCACAAC | | |
| | | | GAGGGTAATCACAAC | | | | |
| 9a | ssrna1_35 | CcaCas13b | cttgcatgcctgcaggtcga | cttgcatgcc | GTTGGAACTGCT | ssRNA1 | 9a |
| | | | gtagattgctG | tgcaggtcg | CTCATTTTGGAGG | | |
| | | | TTGGAACTGCTCTCATTTTG | agtagattgc | GTAATCACAAC | | |
| | | | GAGGGTAATCACAAC | t | | | |
| 9a | ssrna1_36 | CcaCas13b | gcttgcatgcctgcaggtcg | gcttgcatgc | GTTGGAACTGCT | ssRNA1 | 9a |
| | | | agtagattgc | ctgcaggtc | CTCATTTTGGAGG | | |
| | | | GTTGGAACTGCTCTCATTTT | gagtagattg | GTAATCACAAC | | |
| | | | GGAGGGTAATCACAAC | c | | | |
| 9a | ssrna1_37 | CcaCas13b | agcttgcatgcctgcaggtc | agcttgcatg | GTTGGAACTGCT | ssRNA1 | 9a |
| | | | gagtagattg | cctgcaggt | CTCATTTTGGAGG | | |
| | | | GTTGGAACTGCTCTCATTTT | cgagtagatt | GTAATCACAAC | | |
| | | | GGAGGGTAATCACAAC | g | | | |
| 9a | ssrna1_38 | CcaCas13b | aagcttgcatgcctgcaggt | aagcttgcat | GTTGGAACTGCT | ssRNA1 | 9a |
| | | | cgagtagattG | gcctgcagg | CTCATTTTGGAGG | | |
| | | | TTGGAACTGCTCTCATTTTG | tcgagtagat | GTAATCACAAC | | |
| | | | GAGGGTAATCACAAC | t | | | |
| 9a | ssrna1_39 | CcaCas13b | caagcttgcatgcctgcagg | caagcttgca | GTTGGAACTGCT | ssRNA1 | 9a |
| | | | tcgagtagat | tgcctgcag | CTCATTTTGGAGG | | |
| | | | GTTGGAACTGCTCTCATTTT | gtcgagtag | GTAATCACAAC | | |
| | | | GGAGGGTAATCACAAC | at | | | |
| 9a | ssrna1_40 | CcaCas13b | ccaagcttgcatgcctgcag | ccaagcttgc | GTTGGAACTGCT | ssRNA1 | 9a |
| | | | gtcgagtaga | atgcctgca | CTCATTTTGGAGG | | |
| | | | GTTGGAACTGCTCTCATTTT | ggtcgagta | GTAATCACAAC | | |
| | | | GGAGGGTAATCACAAC | ga | | | |
| 9a | ssrna1_41 | CcaCas13b | gccaagcttgcatgcctgca | gccaagctt | GTTGGAACTGCT | ssRNA1 | 9a |
| | | | ggtcgagtag | gcatgcctg | CTCATTTTGGAGG | | |
| | | | GTTGGAACTGCTCTCATTTT | caggtcgag | GTAATCACAAC | | |
| | | | GGAGGGTAATCACAAC | tag | | | |
| 9a | ssrna1_42 | CcaCas13b | cgccaagcttgcatgcctgc | cgccaagctt | GTTGGAACTGCT | ssRNA1 | 9a |
| | | | aggtcgagta | gcatgcctg | CTCATTTTGGAGG | | |
| | | | GTTGGAACTGCTCTCATTTT | caggtcgag | GTAATCACAAC | | |
| | | | GGAGGGTAATCACAAC | ta | | | |
| 9a | ssrna1_43 | CcaCas13b | tacgccaagcttgcatgcct | tacgccaag | GTTGGAACTGCT | ssRNA1 | 9a |
| | | | gcaggtcgag | cttgcatgcc | CTCATTTTGGAGG | | |
| | | | GTTGGAACTGCTCTCATTTT | tgcaggtcg | GTAATCACAAC | | |
| | | | GGAGGGTAATCACAAC | ag | | | |
| 9a | ssrna1_44 | CcaCas13b | ttacgccaagcttgcatgcc | ttacgccaag | GTTGGAACTGCT | ssRNA1 | 9a |
| | | | tgcaggtcga | cttgcatgcc | CTCATTTTGGAGG | | |
| | | | GTTGGAACTGCTCTCATTTT | tgcaggtcg | GTAATCACAAC | | |
| | | | GGAGGGTAATCACAAC | a | | | |
| 9a | ssrna1_45 | CcaCas13b | attacgccaagcttgcatgc | attacgccaa | GTTGGAACTGCT | ssRNA1 | 9a |
| | | | ctgcaggtcg | gcttgcatgc | CTCATTTTGGAGG | | |
| | | | GTTGGAACTGCTCTCATTTT | ctgcaggtc | GTAATCACAAC | | |
| | | | GGAGGGTAATCACAAC | g | | | |
| 9a | ssrna1_46 | CcaCas13b | gattacgccaagcttgcatg | gattacgcca | GTTGGAACTGCT | ssRNA1 | 9a |
| | | | cctgcaggtc | agcttgcatg | CTCATTTTGGAGG | | |
| | | | GTTGGAACTGCTCTCATTTT | cctgcaggt | GTAATCACAAC | | |
| | | | GGAGGGTAATCACAAC | c | | | |
| 9a | ssrna1_47 | CcaCas13b | tgattacgccaagcttgcat | tgattacgcc | GTTGGAACTGCT | ssRNA1 | 9a |
| | | | gcctgcaggtG | aagcttgcat | CTCATTTTGGAGG | | |
| | | | TTGGAACTGCTCTCATTTTG | gcctgcagg | GTAATCACAAC | | |
| | | | GAGGGTAATCACAAC | t | | | |
| 9a | ssrna1_48 | CcaCas13b | atgattacgccaagcttgca | atgattacgc | GTTGGAACTGCT | ssRNA1 | 9a |
| | | | tgcctgcagg | caagcttgca | CTCATTTTGGAGG | | |
| | | | GTTGGAACTGCTCTCATTTT | tgcctgcag | GTAATCACAAC | | |
| | | | GGAGGGTAATCACAAC | g | | | |
| 9a | ssrna1_49 | CcaCas13b | catgattacgccaagcttgc | catgattacg | GTTGGAACTGCT | ssRNA1 | 9a |
| | | | atgcctgcag | ccaagcttgc | CTCATTTTGGAGG | | |
| | | | GTTGGAACTGCTCTCATTTT | atgcctgca | GTAATCACAAC | | |
| | | | GGAGGGTAATCACAAC | g | | | |
| 9a | ssrna1_50 | CcaCas13b | accatgattacgccaagctt | accatgatta | GTTGGAACTGCT | ssRNA1 | 9a |
| | | | gcatgcctgcG | cgccaagctt | CTCATTTTGGAGG | | |
| | | | TTGGAACTGCTCTCATTTTG | gcatgcctg | GTAATCACAAC | | |
| | | | GAGGGTAATCACAAC | c | | | |
| 9a | ssrna1_51 | CcaCas13b | gaccatgattacgccaagct | gaccatgatt | GTTGGAACTGCT | ssRNA1 | 9a |
| | | | tgcatgcctg | acgccaagc | CTCATTTTGGAGG | | |
| | | | GTTGGAACTGCTCTCATTTT | ttgcatgcct | GTAATCACAAC | | |
| | | | GGAGGGTAATCACAAC | g | | | |
| 9a | ssrna1_52 | CcaCas13b | tgaccatgattacgccaagc | tgaccatgat | GTTGGAACTGCT | ssRNA1 | 9a |
| | | | ttgcatgcctG | tacgccaag | CTCATTTTGGAGG | | |
| | | | TTGGAACTGCTCTCATTTTG | cttgcatgcc | GTAATCACAAC | | |
| | | | GAGGGTAATCACAAC | t | | | |
| 9a | ssrna1_53 | CcaCas13b | atgaccatgattacgccaag | atgaccatga | GTTGGAACTGCT | ssRNA1 | 9a |
| | | | cttgcatgccG | ttacgccaag | CTCATTTTGGAGG | | |
| | | | TTGGAACTGCTCTCATTTTG | cttgcatgcc | GTAATCACAAC | | |
| | | | GAGGGTAATCACAAC | | | | |
| 9a | ssrna1_54 | CcaCas13b | ctatgaccatgattacgcca | ctatgaccat | GTTGGAACTGCT | ssRNA1 | 9a |
| | | | agcttgcatgG | gattacgcca | CTCATTTTGGAGG | | |
| | | | TTGGAACTGCTCTCATTTTG | agcttgcatg | GTAATCACAAC | | |
| | | | GAGGGTAATCACAAC | | | | |
| 9a | ssrna1_55 | CcaCas13b | gctatgaccatgattacgcc | gctatgacca | GTTGGAACTGCT | ssRNA1 | 9a |
| | | | aagcttgcatG | tgattacgcc | CTCATTTTGGAGG | | |
| | | | TTGGAACTGCTCTCATTTTG | aagcttgcat | GTAATCACAAC | | |
| | | | GAGGGTAATCACAAC | | | | |
| 9a | ssrna1_56 | CcaCas13b | acagctatgaccatgattac | acagctatga | GTTGGAACTGCT | ssRNA1 | 9a |
| | | | gccaagcttgG | ccatgattac | CTCATTTTGGAGG | | |
| | | | TTGGAACTGCTCTCATTTTG | gccaagctt | GTAATCACAAC | | |
| | | | GAGGGTAATCACAAC | g | | | |
| 9a | ssrna1_57 | CcaCas13b | aacagctatgaccatgatta | aacagctatg | GTTGGAACTGCT | ssRNA1 | 9a |
| | | | cgccaagcttG | accatgatta | CTCATTTTGGAGG | | |
| | | | TTGGAACTGCTCTCATTTTG | cgccaagctt | GTAATCACAAC | | |
| | | | GAGGGTAATCACAAC | | | | |
| 9a | ssrna1_58 | CcaCas13b | aaacagctatgaccatgatt | aaacagctat | GTTGGAACTGCT | ssRNA1 | 9a |
| | | | acgccaagct | gaccatgatt | CTCATTTTGGAGG | | |
| | | | GTTGGAACTGCTCTCATTTT | acgccaagc | GTAATCACAAC | | |
| | | | GGAGGGTAATCACAAC | t | | | |
| 9a | ssrna1_59 | CcaCas13b | gaaacagctatgaccatgat | gaaacagct | GTTGGAACTGCT | ssRNA1 | 9a |
| | | | tacgccaagc | atgaccatga | CTCATTTTGGAGG | | |
| | | | GTTGGAACTGCTCTCATTTT | ttacgccaag | GTAATCACAAC | | |
| | | | GGAGGGTAATCACAAC | c | | | |
| 9a | ssrna1_60 | CcaCas13b | caggaaacagctatgaccat | caggaaaca | GTTGGAACTGCT | ssRNA1 | 9a |
| | | | gattacgcca | gctatgacca | CTCATTTTGGAGG | | |
| | | | GTTGGAACTGCTCTCATTTT | tgattacgcc | GTAATCACAAC | | |
| | | | GGAGGGTAATCACAAC | a | | | |
| 9a | ssrna1_61 | CcaCas13b | acaggaaacagctatgacca | acaggaaac | GTTGGAACTGCT | ssRNA1 | 9a |
| | | | tgattacgcc | agctatgacc | CTCATTTTGGAGG | | |
| | | | GTTGGAACTGCTCTCATTTT | atgattacgc | GTAATCACAAC | | |
| | | | GGAGGGTAATCACAAC | c | | | |
| 9a | ssrna1_62 | CcaCas13b | cacaggaaacagctatgacc | cacaggaaa | GTTGGAACTGCT | ssRNA1 | 9a |
| | | | atgattacgc | cagctatgac | CTCATTTTGGAGG | | |
| | | | GTTGGAACTGCTCTCATTTT | catgattacg | GTAATCACAAC | | |
| | | | GGAGGGTAATCACAAC | c | | | |
| 9a | ssrna1_63 | CcaCas13b | taaacacaggaaacagctat | taaacacag | GTTGGAACTGCT | ssRNA1 | 9a |
| | | | gaccatgatt | gaaacagct | CTCATTTTGGAGG | | |
| | | | GTTGGAACTGCTCTCATTTT | atgaccatga | GTAATCACAAC | | |
| | | | GGAGGGTAATCACAAC | tt | | | |
| 9a | ssrna1_64 | CcaCas13b | gataaacacaggaaacagct | gataaacac | GTTGGAACTGCT | ssRNA1 | 9a |
| | | | atgaccatga | aggaaacag | CTCATTTTGGAGG | | |
| | | | GTTGGAACTGCTCTCATTTT | ctatgaccat | GTAATCACAAC | | |
| | | | GGAGGGTAATCACAAC | ga | | | |
| 9a | ssrna1_65 | CcaCas13b | ggataaacacaggaaacagc | ggataaaca | GTTGGAACTGCT | ssRNA1 | 9a |
| | | | tatgaccatg | caggaaaca | CTCATTTTGGAGG | | |
| | | | GTTGGAACTGCTCTCATTTT | gctatgacca | GTAATCACAAC | | |
| | | | GGAGGGTAATCACAAC | tg | | | |
| 9a | ssrna1_66 | CcaCas13b | cggataaacacaggaaacag | cggataaac | GTTGGAACTGCT | ssRNA1 | 9a |
| | | | ctatgaccat | acaggaaac | CTCATTTTGGAGG | | |
| | | | GTTGGAACTGCTCTCATTTT | agctatgacc | GTAATCACAAC | | |
| | | | GGAGGGTAATCACAAC | at | | | |
| 9a | ssrna1_67 | CcaCas13b | gcggataaacacaggaaaca | gcggataaa | GTTGGAACTGCT | ssRNA1 | 9a |
| | | | gctatgacca | cacaggaaa | CTCATTTTGGAGG | | |
| | | | GTTGGAACTGCTCTCATTTT | cagctatgac | GTAATCACAAC | | |
| | | | GGAGGGTAATCACAAC | ca | | | |
| 9a | ssrna1_68 | CcaCas13b | agcggataaacacaggaaac | agcggataa | GTTGGAACTGCT | ssRNA1 | 9a |
| | | | agctatgacc | acacaggaa | CTCATTTTGGAGG | | |
| | | | GTTGGAACTGCTCTCATTTT | acagctatga | GTAATCACAAC | | |
| | | | GGAGGGTAATCACAAC | cc | | | |
| 9a | ssrna1_69 | CcaCas13b | gagcggataaacacaggaaa | gagcggata | GTTGGAACTGCT | ssRNA1 | 9a |
| | | | cagctatga | aacacagga | CTCATTTTGGAGG | | |
| | | | cGTTGGAACTGCTCTCATTT | aacagctatg | GTAATCACAAC | | |
| | | | TGGAGGGTAATCACAAC | ac | | | |
| 9a | ssrna1_70 | CcaCas13b | tgagcggataaacacaggaa | tgagcggat | GTTGGAACTGCT | ssRNA1 | 9a |
| | | | acagctatga | aaacacagg | CTCATTTTGGAGG | | |
| | | | GTTGGAACTGCTCTCATTTT | aaacagctat | GTAATCACAAC | | |
| | | | GGAGGGTAATCACAAC | ga | | | |
| 9a | ssrna1_71 | CcaCas13b | tgtgagcggataaacacagg | tgtgagcgg | GTTGGAACTGCT | ssRNA1 | 9a |
| | | | aaacagctat | ataaacaca | CTCATTTTGGAGG | | |
| | | | GTTGGAACTGCTCTCATTTT | ggaaacagc | GTAATCACAAC | | |
| | | | GGAGGGTAATCACAAC | tat | | | |
| 9a | ssrna1_72 | CcaCas13b | attgtgagcggataaacaca | attgtgagcg | GTTGGAACTGCT | ssRNA1 | 9a |
| | | | ggaaacagct | gataaacac | CTCATTTTGGAGG | | |
| | | | GTTGGAACTGCTCTCATTTT | aggaaacag | GTAATCACAAC | | |
| | | | GGAGGGTAATCACAAC | ct | | | |
| 9a | ssrna1_73 | CcaCas13b | aattgtgagcggataaacac | aattgtgagc | GTTGGAACTGCT | ssRNA1 | 9a |
| | | | aggaaacagc | ggataaaca | CTCATTTTGGAGG | | |
| | | | GTTGGAACTGCTCTCATTTT | caggaaaca | GTAATCACAAC | | |
| | | | GGAGGGTAATCACAAC | gc | | | |
| 9a | ssrna1_74 | CcaCas13b | gaattgtgagcggataaaca | gaattgtgag | GTTGGAACTGCT | ssRNA1 | 9a |
| | | | caggaaacag | cggataaac | CTCATTTTGGAGG | | |
| | | | GTTGGAACTGCTCTCATTTT | acaggaaac | GTAATCACAAC | | |
| | | | GGAGGGTAATCACAAC | ag | | | |
| 9a | ssrna1_75 | CcaCas13b | gtggaattgtgagcggataa | gtggaattgt | GTTGGAACTGCT | ssRNA1 | 9a |
| | | | acacaggaaa | gagcggata | CTCATTTTGGAGG | | |
| | | | GTTGGAACTGCTCTCATTTT | aacacagga | GTAATCACAAC | | |
| | | | GGAGGGTAATCACAAC | aa | | | |
| 9a | ssrna1_76 | CcaCas13b | tgtggaattgtgagcggata | tgtggaattg | GTTGGAACTGCT | ssRNA1 | 9a |
| | | | aacacaggaa | tgagcggat | CTCATTTTGGAGG | | |
| | | | GTTGGAACTGCTCTCATTTT | aaacacagg | GTAATCACAAC | | |
| | | | GGAGGGTAATCACAAC | aa | | | |
| 9a | ssrna1_77 | CcaCas13b | gtgtggaattgtgagcggat | gtgtggaatt | GTTGGAACTGCT | ssRNA1 | 9a |
| | | | aaacacagga | gtgagcgga | CTCATTTTGGAGG | | |
| | | | GTTGGAACTGCTCTCATTTT | taaacacag | GTAATCACAAC | | |
| | | | GGAGGGTAATCACAAC | ga | | | |
| 9a | ssrna1_78 | CcaCas13b | tgtgtggaattgtgagcgga | tgtgtggaat | GTTGGAACTGCT | ssRNA1 | 9a |
| | | | taaacacagg | tgtgagcgg | CTCATTTTGGAGG | | |
| | | | GTTGGAACTGCTCTCATTTT | ataaacaca | GTAATCACAAC | | |
| | | | GGAGGGTAATCACAAC | gg | | | |
| 9a | ssrna1_79 | CcaCas13b | gttgtgtggaattgtgagcg | gttgtgtgga | GTTGGAACTGCT | ssRNA1 | 9a |
| | | | gataaacaca | attgtgagcg | CTCATTTTGGAGG | | |
| | | | GTTGGAACTGCTCTCATTTT | gataaacac | GTAATCACAAC | | |
| | | | GGAGGGTAATCACAAC | a | | | |
| 9a | ssrna1_80 | CcaCas13b | tgttgtgtggaattgtgagc | tgttgtgtgg | GTTGGAACTGCT | ssRNA1 | 9a |
| | | | ggataaacacG | aattgtgagc | CTCATTTTGGAGG | | |
| | | | TTGGAACTGCTCTCATTTTG | ggataaaca | GTAATCACAAC | | |
| | | | GAGGGTAATCACAAC | c | | | |
| 9a | ssrna1_81 | CcaCas13b | atgttgtgtggaattgtgag | atgttgtgtg | GTTGGAACTGCT | ssRNA1 | 9a |
| | | | cggataaacaG | gaattgtgag | CTCATTTTGGAGG | | |
| | | | TTGGAACTGCTCTCATTTTG | cggataaac | GTAATCACAAC | | |
| | | | GAGGGTAATCACAAC | a | | | |
| 9a | ssrna1_82 | CcaCas13b | gtatgttgtgtggaattgtg | gtatgttgtgt | GTTGGAACTGCT | ssRNA1 | 9a |
| | | | agcggataaaG | ggaattgtga | CTCATTTTGGAGG | | |
| | | | TTGGAACTGCTCTCATTTTG | gcggataaa | GTAATCACAAC | | |
| | | | GAGGGTAATCACAAC | | | | |
| 9a | ssrna1_83 | CcaCas13b | cgtatgttgtgtggaattgt | cgtatgttgt | GTTGGAACTGCT | ssRNA1 | 9a |
| | | | gagcggataaG | gtggaattgt | CTCATTTTGGAGG | | |
| | | | TTGGAACTGCTCTCATTTTG | gagcggata | GTAATCACAAC | | |
| | | | GAGGGTAATCACAAC | a | | | |
| 9a | ssrna1_84 | CcaCas13b | tcgtatgttgtgtggaattg | tcgtatgttgt | GTTGGAACTGCT | ssRNA1 | 9a |
| | | | tgagcggataG | gtggaattgt | CTCATTTTGGAGG | | |
| | | | TTGGAACTGCTCTCATTTTG | gagcggata | GTAATCACAAC | | |
| | | | GAGGGTAATCACAAC | | | | |
| 9a | ssrna1_85 | CcaCas13b | gctcgtatgttgtgtggaat | gctcgtatgtt | GTTGGAACTGCT | ssRNA1 | 9a |
| | | | tgtgagcggaG | gtgtggaatt | CTCATTTTGGAGG | | |
| | | | TTGGAACTGCTCTCATTTTG | gtgagcgga | GTAATCACAAC | | |
| | | | GAGGGTAATCACAAC | | | | |
| 9a | ssrna1_86 | CcaCas13b | ggctcgtatgttgtgtggaa | ggctcgtatg | GTTGGAACTGCT | ssRNA1 | 9a |
| | | | ttgtgagcggG | ttgtgtggaa | CTCATTTTGGAGG | | |
| | | | TTGGAACTGCTCTCATTTTG | ttgtgagcgg | GTAATCACAAC | | |
| | | | GAGGGTAATCACAAC | | | | |
| 9a | ssrna1_87 | CcaCas13b | ccggctcgtatgttgtgtgg | ccggctcgt | GTTGGAACTGCT | ssRNA1 | 9a |
| | | | aattgtgagcG | atgttgtgtg | CTCATTTTGGAGG | | |
| | | | TTGGAACTGCTCTCATTTTG | gaattgtgag | GTAATCACAAC | | |
| | | | GAGGGTAATCACAAC | c | | | |
| 9a | ssrna1_88 | CcaCas13b | tccggctcgtatgttgtgtg | tccggctcgt | GTTGGAACTGCT | ssRNA1 | 9a |
| | | | gaattgtgagG | atgttgtgtg | CTCATTTTGGAGG | | |
| | | | TTGGAACTGCTCTCATTTTG | gaattgtgag | GTAATCACAAC | | |
| | | | GAGGGTAATCACAAC | | | | |
| 9a | ssrna1_89 | CcaCas13b | ttccggctcgtatgttgtgt | ttccggctcg | GTTGGAACTGCT | ssRNA1 | 9a |
| | | | ggaattgtgaGT | tatgttgtgtg | CTCATTTTGGAGG | | |
| | | | TGGAACTGCTCTCATTTTG | gaattgtga | GTAATCACAAC | | |
| | | | GAGGGTAATCACAAC | | | | |
| 9a | ssrna1_90 | CcaCas13b | gcttccggctcgtatgttgt | gcttccggct | GTTGGAACTGCT | ssRNA1 | 9a |
| | | | gtggaattgtGT | cgtatgttgt | CTCATTTTGGAGG | | |
| | | | TGGAACTGCTCTCATTTTG | gtggaattgt | GTAATCACAAC | | |
| | | | GAGGGTAATCACAAC | | | | |
| 9a | ssrna1_91 | CcaCas13b | tgcttccggctcgtatgttg | tgcttccggc | GTTGGAACTGCT | ssRNA1 | 9a |
| | | | tgtggaattgGT | tcgtatgttgt | CTCATTTTGGAGG | | |
| | | | TGGAACTGCTCTCATTTTG | gtggaattg | GTAATCACAAC | | |
| | | | GAGGGTAATCACAAC | | | | |
| 9a | ssrna1_92 | CcaCas13b | atgcttccggctcgtatgtt | atgcttccgg | GTTGGAACTGCT | ssRNA1 | 9a |
| | | | gtgtggaattGT | ctcgtatgttg | CTCATTTTGGAGG | | |
| | | | TGGAACTGCTCTCATTTTG | tgtggaatt | GTAATCACAAC | | |
| | | | GAGGGTAATCACAAC | | | | |
| 9a | ssrna1_93 | CcaCas13b | ttatgcttccggctcgtatg | ttatgcttccg | GTTGGAACTGCT | ssRNA1 | 9a |
| | | | ttgtgtggaaGT | gctcgtatgtt | CTCATTTTGGAGG | | |
| | | | TGGAACTGCTCTCATTTTG | gtgtggaa | GTAATCACAAC | | |
| | | | GAGGGTAATCACAAC | | | | |
| 9a | ssrna1_94 | CcaCas13b | tttatgcttccggctcgtat | tttatgcttcc | GTTGGAACTGCT | ssRNA1 | 9a |
| | | | gttgtgtggaGT | ggctcgtatg | CTCATTTTGGAGG | | |
| | | | TGGAACTGCTCTCATTTTG | ttgtgtgga | GTAATCACAAC | | |
| | | | GAGGGTAATCACAAC | | | | |
| 11b | ebola_0 | CcaCas13b | aactgtgaaagacaactctt | aactgtgaaa | GTTGGAACTGCT | Ebola | 11b |
| | | | cactgcgaatG | gacaactctt | CTCATTTTGGAGG | ssRNA | |
| | | | TTGGAACTGCTCTCATTTTG | cactgcgaat | GTAATCACAAC | | |
| | | | GAGGGTAATCACAAC | | | | |
| 11b | ebola_1 | CcaCas13b | caactgtgaaagacaactct | caactgtgaa | GTTGGAACTGCT | Ebola | 11b |
| | | | tcactgcgaa | agacaactct | CTCATTTTGGAGG | ssRNA | |
| | | | GTTGGAACTGCTCTCATTTT | tcactgcgaa | GTAATCACAAC | | |
| | | | GGAGGGTAATCACAAC | | | | |
| 11b | ebola_2 | CcaCas13b | acaactgtgaaagacaactc | acaactgtga | GTTGGAACTGCT | Ebola | 11b |
| | | | ttcactgcga | aagacaact | CTCATTTTGGAGG | ssRNA | |
| | | | GTTGGAACTGCTCTCATTTT | cttcactgcg | GTAATCACAAC | | |
| | | | GGAGGGTAATCACAAC | a | | | |
| 11b | ebola_3 | CcaCas13b | atacaactgtgaaagacaac | atacaactgt | GTTGGAACTGCT | Ebola | 11b |
| | | | tcttcactgcG | gaaagacaa | CTCATTTTGGAGG | ssRNA | |
| | | | TTGGAACTGCTCTCATTTTG | ctcttcactg | GTAATCACAAC | | |
| | | | GAGGGTAATCACAAC | c | | | |
| 11b | ebola_4 | CcaCas13b | gatacaactgtgaaagacaa | gatacaactg | GTTGGAACTGCT | Ebola | 11b |
| | | | ctcttcactgG | tgaaagaca | CTCATTTTGGAGG | ssRNA | |
| | | | TTGGAACTGCTCTCATTTTG | actcttcact | GTAATCACAAC | | |
| | | | GAGGGTAATCACAAC | g | | | |
| 11b | ebola_5 | CcaCas13b | ttgatacaactgtgaaagac | ttgatacaac | GTTGGAACTGCT | Ebola | 11b |
| | | | aactcttcacG | tgtgaaaga | CTCATTTTGGAGG | ssRNA | |
| | | | TTGGAACTGCTCTCATTTTG | caactcttca | GTAATCACAAC | | |
| | | | GAGGGTAATCACAAC | c | | | |
| 11b | ebola_6 | CcaCas13b | tttgatacaactgtgaaaga | tttgatacaa | GTTGGAACTGCT | Ebola | 11b |
| | | | caactcttcaG | ctgtgaaag | CTCATTTTGGAGG | ssRNA | |
| | | | TTGGAACTGCTCTCATTTTG | acaactcttc | GTAATCACAAC | | |
| | | | GAGGGTAATCACAAC | a | | | |
| 11b | ebola_7 | CcaCas13b | cgtttgatacaactgtgaaa | cgtttgatac | GTTGGAACTGCT | Ebola | 11b |
| | | | gacaactcttG | aactgtgaaa | CTCATTTTGGAGG | ssRNA | |
| | | | TTGGAACTGCTCTCATTTTG | gacaactctt | GTAATCACAAC | | |
| | | | GAGGGTAATCACAAC | | | | |
| 11b | ebola_8 | CcaCas13b | ccgtttgatacaactgtgaa | ccgtttgata | GTTGGAACTGCT | Ebola | 11b |
| | | | agacaactctG | caactgtgaa | CTCATTTTGGAGG | ssRNA | |
| | | | TTGGAACTGCTCTCATTTTG | agacaactct | GTAATCACAAC | | |
| | | | GAGGGTAATCACAAC | | | | |
| 11b | ebola_9 | CcaCas13b | ctccgtttgatacaactgtg | ctccgtttgat | GTTGGAACTGCT | Ebola | 11b |
| | | | aaagacaactG | acaactgtga | CTCATTTTGGAGG | ssRNA | |
| | | | TTGGAACTGCTCTCATTTTG | aagacaact | GTAATCACAAC | | |
| | | | GAGGGTAATCACAAC | | | | |
| 11b | ebola_10 | CcaCas13b | gctccgtttgatacaactgt | gctccgtttg | GTTGGAACTGCT | Ebola | 11b |
| | | | gaaagacaacG | atacaactgt | CTCATTTTGGAGG | ssRNA | |
| | | | TTGGAACTGCTCTCATTTTG | gaaagacaa | GTAATCACAAC | | |
| | | | GAGGGTAATCACAAC | c | | | |
| 11b | ebola_11 | CcaCas13b | tggctccgtttgatacaact | tggctccgttt | GTTGGAACTGCT | Ebola | 11b |
| | | | gtgaaagacaG | gatacaactg | CTCATTTTGGAGG | ssRNA | |
| | | | TTGGAACTGCTCTCATTTTG | tgaaagaca | GTAATCACAAC | | |
| | | | GAGGGTAATCACAAC | | | | |
| 11b | ebola_12 | CcaCas13b | ttggctccgtttgatacaac | ttggctccgtt | GTTGGAACTGCT | Ebola | 11b |
| | | | tgtgaaagacG | tgatacaact | CTCATTTTGGAGG | ssRNA | |
| | | | TTGGAACTGCTCTCATTTTG | gtgaaagac | GTAATCACAAC | | |
| | | | GAGGGTAATCACAAC | | | | |
| 11b | ebola_13 | CcaCas13b | tttggctccgtttgatacaa | tttggctccgt | GTTGGAACTGCT | Ebola | 11b |
| | | | ctgtgaaagaG | ttgatacaac | CTCATTTTGGAGG | ssRNA | |
| | | | TTGGAACTGCTCTCATTTTG | tgtgaaaga | GTAATCACAAC | | |
| | | | GAGGGTAATCACAAC | | | | |
| 11b | ebola_14 | CcaCas13b | tttttggctccgtttgatac | tttttggctcc | GTTGGAACTGCT | Ebola | 11b |
| | | | aactgtgaaaGT | gtttgataca | CTCATTTTGGAGG | ssRNA | |
| | | | TGGAACTGCTCTCATTTTG | actgtgaaa | GTAATCACAAC | | |
| | | | GAGGGTAATCACAAC | | | | |
| 11b | ebola_15 | CcaCas13b | gatgtttttggctccgtttg | gatgtttttgg | GTTGGAACTGCT | Ebola | 11b |
| | | | atacaactgtGT | ctccgtttgat | CTCATTTTGGAGG | ssRNA | |
| | | | TGGAACTGCTCTCATTTTG | acaactgt | GTAATCACAAC | | |
| | | | GAGGGTAATCACAAC | | | | |
| 11b | ebola_16 | CcaCas13b | tgatgtttttggctccgttt | tgatgtttttg | GTTGGAACTGCT | Ebola | 11b |
| | | | gatacaactgGT | gctccgtttg | CTCATTTTGGAGG | ssRNA | |
| | | | TGGAACTGCTCTCATTTTG | atacaactg | GTAATCACAAC | | |
| | | | GAGGGTAATCACAAC | | | | |
| 11b | ebola_17 | CcaCas13b | ctgatgtttttggctccgtt | ctgatgttttt | GTTGGAACTGCT | Ebola | 11b |
| | | | tgatacaactGT | ggctccgttt | CTCATTTTGGAGG | ssRNA | |
| | | | TGGAACTGCTCTCATTTTG | gatacaact | GTAATCACAAC | | |
| | | | GAGGGTAATCACAAC | | | | |
| 11b | ebola_18 | CcaCas13b | actgatgtttttggctccgt | actgatgtttt | GTTGGAACTGCT | Ebola | 11b |
| | | | ttgatacaacGT | tggctccgttt | CTCATTTTGGAGG | ssRNA | |
| | | | TGGAACTGCTCTCATTTTG | gatacaac | GTAATCACAAC | | |
| | | | GAGGGTAATCACAAC | | | | |
| 11b | ebola_19 | CcaCas13b | gaccactgatgtttttggct | gaccactgat | GTTGGAACTGCT | Ebola | 11b |
| | | | ccgtttgataGT | gtttttggctc | CTCATTTTGGAGG | ssRNA | |
| | | | TGGAACTGCTCTCATTTTG | cgtttgata | GTAATCACAAC | | |
| | | | GAGGGTAATCACAAC | | | | |
| 11b | ebola_20 | CcaCas13b | tgaccactgatgtttttggc | tgaccactga | GTTGGAACTGCT | Ebola | 11b |
| | | | tccgtttgatGT | tgtttttggct | CTCATTTTGGAGG | ssRNA | |
| | | | TGGAACTGCTCTCATTTTG | ccgtttgat | GTAATCACAAC | | |
| | | | GAGGGTAATCACAAC | | | | |
| 11b | ebola_21 | CcaCas13b | ctgaccactgatgtttttgg | ctgaccactg | GTTGGAACTGCT | Ebola | 11b |
| | | | ctccgtttgaGT | atgtttttggc | CTCATTTTGGAGG | ssRNA | |
| | | | TGGAACTGCTCTCATTTTG | tccgtttga | GTAATCACAAC | | |
| | | | GAGGGTAATCACAAC | | | | |
| 11b | ebola_22 | CcaCas13b | ctctgaccactgatgttttt | ctctgaccac | GTTGGAACTGCT | Ebola | 11b |
| | | | ggctccgtttGT | tgatgtttttg | CTCATTTTGGAGG | ssRNA | |
| | | | TGGAACTGCTCTCATTTTG | gctccgttt | GTAATCACAAC | | |
| | | | GAGGGTAATCACAAC | | | | |
| 11b | ebola_23 | CcaCas13b | actctgaccactgatgtt | actctgacca | GTTGGAACTGCT | Ebola | 11b |
| | | | tttggctccgttGT | ctgatgttttt | CTCATTTTGGAGG | ssRNA | |
| | | | TGGAACTGCTCTCATTTTG | ggctccgtt | GTAATCACAAC | | |
| | | | GAGGGTAATCACAAC | | | | |
| 11b | ebola_24 | CcaCas13b | gactctgaccactgatgttt | gactctgacc | GTTGGAACTGCT | Ebola | 11b |
| | | | ttggctccgtGT | actgatgtttt | CTCATTTTGGAGG | ssRNA | |
| | | | TGGAACTGCTCTCATTTTG | tggctccgt | GTAATCACAAC | | |
| | | | GAGGGTAATCACAAC | | | | |
| 11b | ebola_25 | CcaCas13b | cggactctgaccactgatgt | cggactctg | GTTGGAACTGCT | Ebola | 11b |
| | | | ttttggctccG | accactgatg | CTCATTTTGGAGG | ssRNA | |
| | | | TTGGAACTGCTCTCATTTTG | tttttggctcc | GTAATCACAAC | | |
| | | | GAGGGTAATCACAAC | | | | |
| 11b | ebola_26 | CcaCas13b | gccggactctgaccactgat | gccggactc | GTTGGAACTGCT | Ebola | 11b |
| | | | gtttttggctG | tgaccactga | CTCATTTTGGAGG | ssRNA | |
| | | | TTGGAACTGCTCTCATTTTG | tgtttttggct | GTAATCACAAC | | |
| | | | GAGGGTAATCACAAC | | | | |
| 11b | ebola_27 | CcaCas13b | cgccggactctgaccactga | cgccggact | GTTGGAACTGCT | Ebola | 11b |
| | | | tgtttttggcG | ctgaccactg | CTCATTTTGGAGG | ssRNA | |
| | | | TTGGAACTGCTCTCATTTTG | atgtttttggc | GTAATCACAAC | | |
| | | | GAGGGTAATCACAAC | | | | |
| 11b | ebola_28 | CcaCas13b | gcgccggactctgaccactg | gcgccggac | GTTGGAACTGCT | Ebola | 11b |
| | | | atgtttttggG | tctgaccact | CTCATTTTGGAGG | ssRNA | |
| | | | TTGGAACTGCTCTCATTTTG | gatgtttttgg | GTAATCACAAC | | |
| | | | GAGGGTAATCACAAC | | | | |
| 11b | ebola_29 | CcaCas13b | cgcgccggactctgaccact | cgcgccgga | GTTGGAACTGCT | Ebola | 11b |
| | | | gatgtttttgG | ctctgaccac | CTCATTTTGGAGG | ssRNA | |
| | | | TTGGAACTGCTCTCATTTTG | tgatgtttttg | GTAATCACAAC | | |
| | | | GAGGGTAATCACAAC | | | | |
| 11b | ebola_30 | CcaCas13b | ttcgcgccggactctgacca | ttcgcgccg | GTTGGAACTGCT | Ebola | 11b |
| | | | ctgatgttttG | gactctgacc | CTCATTTTGGAGG | ssRNA | |
| | | | TTGGAACTGCTCTCATTTTG | actgatgtttt | GTAATCACAAC | | |
| | | | GAGGGTAATCACAAC | | | | |
| 11b | ebola_31 | CcaCas13b | agttcgcgccggactctgac | agttcgcgc | GTTGGAACTGCT | Ebola | 11b |
| | | | cactgatgttG | cggactctg | CTCATTTTGGAGG | ssRNA | |
| | | | TTGGAACTGCTCTCATTTTG | accactgatg | GTAATCACAAC | | |
| | | | GAGGGTAATCACAAC | tt | | | |
| 11b | ebola_32 | CcaCas13b | aagttcgcgccggactctga | aagttcgcg | GTTGGAACTGCT | Ebola | 11b |
| | | | ccactgatgt | ccggactct | CTCATTTTGGAGG | ssRNA | |
| | | | GTTGGAACTGCTCTCATTTT | gaccactgat | GTAATCACAAC | | |
| | | | GGAGGGTAATCACAAC | gt | | | |
| 11b | ebola_33 | CcaCas13b | gaagttcgcgccggactctg | gaagttcgc | GTTGGAACTGCT | Ebola | 11b |
| | | | accactgatg | gccggactc | CTCATTTTGGAGG | ssRNA | |
| | | | GTTGGAACTGCTCTCATTTT | tgaccactga | GTAATCACAAC | | |
| | | | GGAGGGTAATCACAAC | tg | | | |
| 11b | ebola_34 | CcaCas13b | agaagttcgcgccggactct | agaagttcg | GTTGGAACTGCT | Ebola | 11b |
| | | | gaccactgat | cgccggact | CTCATTTTGGAGG | ssRNA | |
| | | | GTTGGAACTGCTCTCATTTT | ctgaccactg | GTAATCACAAC | | |
| | | | GGAGGGTAATCACAAC | at | | | |
| 11b | ebola_35 | CcaCas13b | gaagaagttcgcgccggact | gaagaagtt | GTTGGAACTGCT | Ebola | 11b |
| | | | ctgaccactg | cgcgccgga | CTCATTTTGGAGG | ssRNA | |
| | | | GTTGGAACTGCTCTCATTTT | ctctgaccac | GTAATCACAAC | | |
| | | | GGAGGGTAATCACAAC | tg | | | |
| 11b | ebola_36 | CcaCas13b | ggaagaagttcgcgccggac | ggaagaagt | GTTGGAACTGCT | Ebola | 11b |
| | | | tctgaccact | tcgcgccgg | CTCATTTTGGAGG | ssRNA | |
| | | | GTTGGAACTGCTCTCATTTT | actctgacca | GTAATCACAAC | | |
| | | | GGAGGGTAATCACAAC | ct | | | |
| 11b | ebola_37 | CcaCas13b | tcggaagaagttcgcgccgg | tcggaagaa | GTTGGAACTGCT | Ebola | 11b |
| | | | actctgacca | gttcgcgcc | CTCATTTTGGAGG | ssRNA | |
| | | | GTTGGAACTGCTCTCATTTT | ggactctga | GTAATCACAAC | | |
| | | | GGAGGGTAATCACAAC | cca | | | |
| 11b | ebola_38 | CcaCas13b | gtcggaagaagttcgcgccg | gtcggaaga | GTTGGAACTGCT | Ebola | 11b |
| | | | gactctgacc | agttcgcgc | CTCATTTTGGAGG | ssRNA | |
| | | | GTTGGAACTGCTCTCATTTT | cggactctg | GTAATCACAAC | | |
| | | | GGAGGGTAATCACAAC | acc | | | |
| 11b | ebola_39 | CcaCas13b | ggtcggaagaagttcgcgcc | ggtcggaag | GTTGGAACTGCT | Ebola | 11b |
| | | | ggactctgac | aagttcgcg | CTCATTTTGGAGG | ssRNA | |
| | | | GTTGGAACTGCTCTCATTTT | ccggactct | GTAATCACAAC | | |
| | | | GGAGGGTAATCACAAC | gac | | | |
| 11b | ebola_40 | CcaCas13b | gggtcggaagaagttcgcgc | gggtcggaa | GTTGGAACTGCT | Ebola | 11b |
| | | | cggactctga | gaagttcgc | CTCATTTTGGAGG | ssRNA | |
| | | | GTTGGAACTGCTCTCATTTT | gccggactc | GTAATCACAAC | | |
| | | | GGAGGGTAATCACAAC | tga | | | |
| 11b | ebola_41 | CcaCas13b | tgggtcggaagaagttcgcg | tgggtcgga | GTTGGAACTGCT | Ebola | 11b |
| | | | ccggactctg | agaagttcg | CTCATTTTGGAGG | ssRNA | |
| | | | GTTGGAACTGCTCTCATTTT | cgccggact | GTAATCACAAC | | |
| | | | GGAGGGTAATCACAAC | ctg | | | |
| 11b | ebola_42 | CcaCas13b | ccctgggtcggaagaagttc | ccctgggtc | GTTGGAACTGCT | Ebola | 11b |
| | | | gcgccggact | ggaagaagt | CTCATTTTGGAGG | ssRNA | |
| | | | GTTGGAACTGCTCTCATTTT | tcgcgccgg | GTAATCACAAC | | |
| | | | GGAGGGTAATCACAAC | act | | | |
| 11b | ebola_43 | CcaCas13b | tccctgggtcggaagaagtt | tccctgggtc | GTTGGAACTGCT | Ebola | 11b |
| | | | cgcgccggac | ggaagaagt | CTCATTTTGGAGG | ssRNA | |
| | | | GTTGGAACTGCTCTCATTTT | tcgcgccgg | GTAATCACAAC | | |
| | | | GGAGGGTAATCACAAC | ac | | | |
| 11b | ebola_44 | CcaCas13b | gtccctgggtcggaagaagt | gtccctgggt | GTTGGAACTGCT | Ebola | 11b |
| | | | tcgcgccgga | cggaagaag | CTCATTTTGGAGG | ssRNA | |
| | | | GTTGGAACTGCTCTCATTTT | ttcgcgccg | GTAATCACAAC | | |
| | | | GGAGGGTAATCACAAC | ga | | | |
| 11b | ebola_45 | CcaCas13b | ggtccctgggtcggaagaag | ggtccctgg | GTTGGAACTGCT | Ebola | 11b |
| | | | ttcgcgccgg | gtcggaaga | CTCATTTTGGAGG | ssRNA | |
| | | | GTTGGAACTGCTCTCATTTT | agttcgcgc | GTAATCACAAC | | |
| | | | GGAGGGTAATCACAAC | cgg | | | |
| 11b | ebola_46 | CcaCas13b | tggtccctgggtcggaagaa | tggtccctgg | GTTGGAACTGCT | Ebola | 11b |
| | | | gttcgcgccg | gtcggaaga | CTCATTTTGGAGG | ssRNA | |
| | | | GTTGGAACTGCTCTCATTTT | agttcgcgc | GTAATCACAAC | | |
| | | | GGAGGGTAATCACAAC | cg | | | |
| 11b | ebola_47 | CcaCas13b | ttggtccctgggtcggaaga | ttggtccctg | GTTGGAACTGCT | Ebola | 11b |
| | | | agttcgcgcc | ggtcggaag | CTCATTTTGGAGG | ssRNA | |
| | | | GTTGGAACTGCTCTCATTTT | aagttcgcg | GTAATCACAAC | | |
| | | | GGAGGGTAATCACAAC | cc | | | |
| 11b | ebola_48 | CcaCas13b | gtgttggtccctgggtcgga | gtgttggtcc | GTTGGAACTGCT | Ebola | 11b |
| | | | agaagttcgc | ctgggtcgg | CTCATTTTGGAGG | ssRNA | |
| | | | GTTGGAACTGCTCTCATTTT | aagaagttc | GTAATCACAAC | | |
| | | | GGAGGGTAATCACAAC | gc | | | |
| 11b | ebola_49 | CcaCas13b | tgtgttggtccctgggtcgg | tgtgttggtc | GTTGGAACTGCT | Ebola | 11b |
| | | | aagaagttcgG | cctgggtcg | CTCATTTTGGAGG | ssRNA | |
| | | | TTGGAACTGCTCTCATTTTG | gaagaagtt | GTAATCACAAC | | |
| | | | GAGGGTAATCACAAC | cg | | | |
| 11b | ebola_50 | CcaCas13b | ttgtgttggtccctgggtcg | ttgtgttggtc | GTTGGAACTGCT | Ebola | 11b |
| | | | gaagaagttcG | cctgggtcg | CTCATTTTGGAGG | ssRNA | |
| | | | TTGGAACTGCTCTCATTTTG | gaagaagtt | GTAATCACAAC | | |
| | | | GAGGGTAATCACAAC | c | | | |
| 11b | ebola_51 | CcaCas13b | tgttgtgttggtccctgggt | tgttgtgttgg | GTTGGAACTGCT | Ebola | 11b |
| | | | cggaagaagtG | tccctgggtc | CTCATTTTGGAGG | ssRNA | |
| | | | TTGGAACTGCTCTCATTTTG | ggaagaagt | GTAATCACAAC | | |
| | | | GAGGGTAATCACAAC | | | | |
| 11b | ebola_52 | CcaCas13b | ttgttgtgttggtccctggg | ttgttgtgttg | GTTGGAACTGCT | Ebola | 11b |
| | | | tcggaagaagG | gtccctgggt | CTCATTTTGGAGG | ssRNA | |
| | | | TTGGAACTGCTCTCATTTTG | cggaagaag | GTAATCACAAC | | |
| | | | GAGGGTAATCACAAC | | | | |
| 11b | ebola_53 | CcaCas13b | gttgttgtgttggtccctgg | gttgttgtgtt | GTTGGAACTGCT | Ebola | 11b |
| | | | gtcggaagaaG | ggtccctgg | CTCATTTTGGAGG | ssRNA | |
| | | | TTGGAACTGCTCTCATTTTG | gtcggaaga | GTAATCACAAC | | |
| | | | GAGGGTAATCACAAC | a | | | |
| 11b | ebola_54 | CcaCas13b | tcagttgttgtgttggtccc | tcagttgttgt | GTTGGAACTGCT | Ebola | 11b |
| | | | tgggtcggaaG | gttggtccct | CTCATTTTGGAGG | ssRNA | |
| | | | TTGGAACTGCTCTCATTTTG | gggtcggaa | GTAATCACAAC | | |
| | | | GAGGGTAATCACAAC | | | | |
| 11b | ebola_55 | CcaCas13b | ttcagttgttgtgttggtcc | ttcagttgttg | GTTGGAACTGCT | Ebola | 11b |
| | | | ctgggtcggaG | tgttggtccct | CTCATTTTGGAGG | ssRNA | |
| | | | TTGGAACTGCTCTCATTTTG | gggtcgga | GTAATCACAAC | | |
| | | | GAGGGTAATCACAAC | | | | |
| 11b | ebola_56 | CcaCas13b | cttcagttgttgtgttggtc | cttcagttgtt | GTTGGAACTGCT | Ebola | 11b |
| | | | cctgggtcggG | gtgttggtcc | CTCATTTTGGAGG | ssRNA | |
| | | | TTGGAACTGCTCTCATTTTG | ctgggtcgg | GTAATCACAAC | | |
| | | | GAGGGTAATCACAAC | | | | |
| 11b | ebola_57 | CcaCas13b | tcttcagttgttgtgttggt | tcttcagttgt | GTTGGAACTGCT | Ebola | 11b |
| | | | ccctgggtcgGT | tgtgttggtc | CTCATTTTGGAGG | ssRNA | |
| | | | TGGAACTGCTCTCATTTTG | cctgggtcg | GTAATCACAAC | | |
| | | | GAGGGTAATCACAAC | | | | |
| 11b | ebola_58 | CcaCas13b | gtcttcagttgttgtgttgg | gtcttcagttg | GTTGGAACTGCT | Ebola | 11b |
| | | | tccctgggtcGT | ttgtgttggtc | CTCATTTTGGAGG | ssRNA | |
| | | | TGGAACTGCTCTCATTTTG | cctgggtc | GTAATCACAAC | | |
| | | | GAGGGTAATCACAAC | | | | |
| 11b | ebola_59 | CcaCas13b | ggtcttcagttgttgtgttg | ggtcttcagtt | GTTGGAACTGCT | Ebola | 11b |
| | | | gtccctgggtGT | gttgtgttggt | CTCATTTTGGAGG | ssRNA | |
| | | | TGGAACTGCTCTCATTTTG | ccctgggt | GTAATCACAAC | | |
| | | | GAGGGTAATCACAAC | | | | |
| 11b | ebola_60 | CcaCas13b | tgtggtcttcagttgttgtg | tgtggtcttca | GTTGGAACTGCT | Ebola | 11b |
| | | | ttggtccctgGT | gttgttgtgtt | CTCATTTTGGAGG | ssRNA | |
| | | | TGGAACTGCTCTCATTTTG | ggtccctg | GTAATCACAAC | | |
| | | | GAGGGTAATCACAAC | | | | |
| 11b | ebola_61 | CcaCas13b | ttgtggtcttcagttgttgt | ttgtggtcttc | GTTGGAACTGCT | Ebola | 11b |
| | | | gttggtccctGT | agttgttgtgt | CTCATTTTGGAGG | ssRNA | |
| | | | TGGAACTGCTCTCATTTTG | tggtccct | GTAATCACAAC | | |
| | | | GAGGGTAATCACAAC | | | | |
| 11b | ebola_62 | CcaCas13b | tttgtggtcttcagttgttg | tttgtggtctt | GTTGGAACTGCT | Ebola | 11b |
| | | | tgttggtcccGT | cagttgttgt | CTCATTTTGGAGG | ssRNA | |
| | | | TGGAACTGCTCTCATTTTG | gttggtccc | GTAATCACAAC | | |
| | | | GAGGGTAATCACAAC | | | | |
| 11b | ebola_63 | CcaCas13b | ttttgtggtcttcagttgtt | ttttgtggtctt | GTTGGAACTGCT | Ebola | 11b |
| | | | gtgttggtccGTT | cagttgttgt | CTCATTTTGGAGG | ssRNA | |
| | | | GGAACTGCTCTCATTTTGG | gttggtcc | GTAATCACAAC | | |
| | | | AGGGTAATCACAAC | | | | |
| 11b | ebola_64 | CcaCas13b | gattttgtggtcttcagttg | gattttgtggt | GTTGGAACTGCT | Ebola | 11b |
| | | | ttgtgttggtGTT | cttcagttgtt | CTCATTTTGGAGG | ssRNA | |
| | | | GGAACTGCTCTCATTTTGG | gtgttggt | GTAATCACAAC | | |
| | | | AGGGTAATCACAAC | | | | |
| 11b | ebola_65 | CcaCas13b | tgattttgtggtcttcagtt | tgattttgtgg | GTTGGAACTGCT | Ebola | 11b |
| | | | gttgtgttggGTT | tcttcagttgt | CTCATTTTGGAGG | ssRNA | |
| | | | GGAACTGCTCTCATTTTGG | tgtgttgg | GTAATCACAAC | | |
| | | | AGGGTAATCACAAC | | | | |
| 11b | ebola_66 | CcaCas13b | atgattttgtggtcttcagt | atgattttgtg | GTTGGAACTGCT | Ebola | 11b |
| | | | tgttgtgttgGTT | gtcttcagttg | CTCATTTTGGAGG | ssRNA | |
| | | | GGAACTGCTCTCATTTTGG | ttgtgttg | GTAATCACAAC | | |
| | | | AGGGTAATCACAAC | | | | |
| 11b | ebola_67 | CcaCas13b | ccatgattttgtggtcttca | ccatgattttg | GTTGGAACTGCT | Ebola | 11b |
| | | | gttgttgtgtGTT | tggtcttcagt | CTCATTTTGGAGG | ssRNA | |
| | | | GGAACTGCTCTCATTTTGG | tgttgtgt | GTAATCACAAC | | |
| | | | AGGGTAATCACAAC | | | | |
| 11b | ebola_68 | CcaCas13b | agccatgattttgtggtctt | agccatgatt | GTTGGAACTGCT | Ebola | 11b |
| | | | cagttgttgtGT | ttgtggtcttc | CTCATTTTGGAGG | ssRNA | |
| | | | TGGAACTGCTCTCATTTTG | agttgttgt | GTAATCACAAC | | |
| | | | GAGGGTAATCACAAC | | | | |
| 11b | ebola_69 | CcaCas13b | aagccatgattttgtggtct | aagccatgat | GTTGGAACTGCT | Ebola | 11b |
| | | | tcagttgttgGT | tttgtggtctt | CTCATTTTGGAGG | ssRNA | |
| | | | TGGAACTGCTCTCATTTTG | cagttgttg | GTAATCACAAC | | |
| | | | GAGGGTAATCACAAC | | | | |
| 11b | ebola_70 | CcaCas13b | gaagccatgattttgtggtc | gaagccatg | GTTGGAACTGCT | Ebola | 11b |
| | | | ttcagttgttGT | attttgtggtc | CTCATTTTGGAGG | ssRNA | |
| | | | TGGAACTGCTCTCATTTTG | ttcagttgtt | GTAATCACAAC | | |
| | | | GAGGGTAATCACAAC | | | | |
| 11b | ebola_71 | CcaCas13b | tgaagccatgattttgtggt | tgaagccat | GTTGGAACTGCT | Ebola | 11b |
| | | | cttcagttgtGT | gattttgtggt | CTCATTTTGGAGG | ssRNA | |
| | | | TGGAACTGCTCTCATTTTG | cttcagttgt | GTAATCACAAC | | |
| | | | GAGGGTAATCACAAC | | | | |
| 11b | ebola_72 | CcaCas13b | ttctgaagccatgattttgt | ttctgaagcc | GTTGGAACTGCT | Ebola | 11b |
| | | | ggtcttcagtGT | atgattttgtg | CTCATTTTGGAGG | ssRNA | |
| | | | TGGAACTGCTCTCATTTTG | gtcttcagt | GTAATCACAAC | | |
| | | | GAGGGTAATCACAAC | | | | |
| 11b | ebola_73 | CcaCas13b | tttctgaagccatgattttg | tttctgaagc | GTTGGAACTGCT | Ebola | 11b |
| | | | tggtcttcagGT | catgattttgt | CTCATTTTGGAGG | ssRNA | |
| | | | TGGAACTGCTCTCATTTTG | ggtcttcag | GTAATCACAAC | | |
| | | | GAGGGTAATCACAAC | | | | |
| 11b | ebola_74 | CcaCas13b | attttctgaagccatgattt | attttctgaag | GTTGGAACTGCT | Ebola | 11b |
| | | | tgtggtcttcGT | ccatgattttg | CTCATTTTGGAGG | ssRNA | |
| | | | TGGAACTGCTCTCATTTTG | tggtcttc | GTAATCACAAC | | |
| | | | GAGGGTAATCACAAC | | | | |
| 11b | ebola_75 | CcaCas13b | aattttctgaagccatgatt | aattttctgaa | GTTGGAACTGCT | Ebola | 11b |
| | | | ttgtggtcttGT | gccatgatttt | CTCATTTTGGAGG | ssRNA | |
| | | | TGGAACTGCTCTCATTTTG | gtggtctt | GTAATCACAAC | | |
| | | | GAGGGTAATCACAAC | | | | |
| 11b | ebola_76 | CcaCas13b | gaattttctgaagccatgat | gaattttctga | GTTGGAACTGCT | Ebola | 11b |
| | | | tttgtggtctGT | agccatgatt | CTCATTTTGGAGG | ssRNA | |
| | | | TGGAACTGCTCTCATTTTG | ttgtggtct | GTAATCACAAC | | |
| | | | GAGGGTAATCACAAC | | | | |
| 11b | ebola_77 | CcaCas13b | aggaattttctgaagccatg | aggaattttct | GTTGGAACTGCT | Ebola | 11b |
| | | | attttgtggtGT | gaagccatg | CTCATTTTGGAGG | ssRNA | |
| | | | TGGAACTGCTCTCATTTTG | attttgtggt | GTAATCACAAC | | |
| | | | GAGGGTAATCACAAC | | | | |
| 11b | ebola_78 | CcaCas13b | agaggaattttctgaagcca | agaggaattt | GTTGGAACTGCT | Ebola | 11b |
| | | | tgattttgtgG | tctgaagcca | CTCATTTTGGAGG | ssRNA | |
| | | | TTGGAACTGCTCTCATTTTG | tgattttgtg | GTAATCACAAC | | |
| | | | GAGGGTAATCACAAC | | | | |
| 11b | ebola_79 | CcaCas13b | cagaggaattttctgaagcc | cagaggaat | GTTGGAACTGCT | Ebola | 11b |
| | | | atgattttgtGT | tttctgaagc | CTCATTTTGGAGG | ssRNA | |
| | | | TGGAACTGCTCTCATTTTG | catgattttgt | GTAATCACAAC | | |
| | | | GAGGGTAATCACAAC | | | | |
| 11b | ebola_80 | CcaCas13b | gcagaggaattttctgaagc | gcagaggaa | GTTGGAACTGCT | Ebola | 11b |
| | | | catgattttgG | ttttctgaagc | CTCATTTTGGAGG | ssRNA | |
| | | | TTGGAACTGCTCTCATTTTG | catgattttg | GTAATCACAAC | | |
| | | | GAGGGTAATCACAAC | | | | |
| 11b | ebola_81 | CcaCas13b | tgcagaggaattttctgaag | tgcagagga | GTTGGAACTGCT | Ebola | 11b |
| | | | ccatgattttGT | attttctgaag | CTCATTTTGGAGG | ssRNA | |
| | | | TGGAACTGCTCTCATTTTG | ccatgatttt | GTAATCACAAC | | |
| | | | GAGGGTAATCACAAC | | | | |
| 11b | ebola_82 | CcaCas13b | cattgcagaggaattttctg | cattgcaga | GTTGGAACTGCT | Ebola | 11b |
| | | | aagccatgatG | ggaattttctg | CTCATTTTGGAGG | ssRNA | |
| | | | TTGGAACTGCTCTCATTTTG | aagccatgat | GTAATCACAAC | | |
| | | | GAGGGTAATCACAAC | | | | |
| 11b | ebola_83 | CcaCas13b | ccattgcagaggaattttct | ccattgcaga | GTTGGAACTGCT | Ebola | 11b |
| | | | gaagccatgaG | ggaattttctg | CTCATTTTGGAGG | ssRNA | |
| | | | TTGGAACTGCTCTCATTTTG | aagccatga | GTAATCACAAC | | |
| | | | GAGGGTAATCACAAC | | | | |
| 11b | ebola_84 | CcaCas13b | accattgcagaggaattttc | accattgcag | GTTGGAACTGCT | Ebola | 11b |
| | | | tgaagccatgG | aggaattttct | CTCATTTTGGAGG | ssRNA | |
| | | | TTGGAACTGCTCTCATTTTG | gaagccatg | GTAATCACAAC | | |
| | | | GAGGGTAATCACAAC | | | | |
| 11b | ebola_85 | CcaCas13b | aaccattgcagaggaatttt | aaccattgca | GTTGGAACTGCT | Ebola | 11b |
| | | | ctgaagccatG | gaggaatttt | CTCATTTTGGAGG | ssRNA | |
| | | | TTGGAACTGCTCTCATTTTG | ctgaagccat | GTAATCACAAC | | |
| | | | GAGGGTAATCACAAC | | | | |
| 11b | ebola_86 | CcaCas13b | ttgaaccattgcagaggaat | ttgaaccatt | GTTGGAACTGCT | Ebola | 11b |
| | | | tttctgaagcG | gcagaggaa | CTCATTTTGGAGG | ssRNA | |
| | | | TTGGAACTGCTCTCATTTTG | ttttctgaagc | GTAATCACAAC | | |
| | | | GAGGGTAATCACAAC | | | | |
| 11b | ebola_87 | CcaCas13b | acttgaaccattgcagagga | acttgaacca | GTTGGAACTGCT | Ebola | 11b |
| | | | attttctgaaG | ttgcagagg | CTCATTTTGGAGG | ssRNA | |
| | | | TTGGAACTGCTCTCATTTTG | aattttctgaa | GTAATCACAAC | | |
| | | | GAGGGTAATCACAAC | | | | |
| 1b | ebola_88 | CcaCas13b | cacttgaaccattgcagagg | cacttgaacc | GTTGGAACTGCT | Ebola | 11b |
| | | | aattttctgaG | attgcagag | CTCATTTTGGAGG | ssRNA | |
| | | | TTGGAACTGCTCTCATTTTG | gaattttctga | GTAATCACAAC | | |
| | | | GAGGGTAATCACAAC | | | | |
| 11b | ebola_89 | CcaCas13b | tgcacttgaaccattgcaga | tgcacttgaa | GTTGGAACTGCT | Ebola | 11b |
| | | | ggaattttctG | ccattgcaga | CTCATTTTGGAGG | ssRNA | |
| | | | TTGGAACTGCTCTCATTTTG | ggaattttct | GTAATCACAAC | | |
| | | | GAGGGTAATCACAAC | | | | |
| 11b | ebola_90 | CcaCas13b | gtgcacttgaaccattgcag | gtgcacttga | GTTGGAACTGCT | Ebola | 11b |
| | | | aggaattttcG | accattgcag | CTCATTTTGGAGG | ssRNA | |
| | | | TTGGAACTGCTCTCATTTTG | aggaattttc | GTAATCACAAC | | |
| | | | GAGGGTAATCACAAC | | | | |
| 11b | ebola_91 | CcaCas13b | ctgtgcacttgaaccattgc | ctgtgcactt | GTTGGAACTGCT | Ebola | 11b |
| | | | agaggaatttG | gaaccattgc | CTCATTTTGGAGG | ssRNA | |
| | | | TTGGAACTGCTCTCATTTTG | agaggaattt | GTAATCACAAC | | |
| | | | GAGGGTAATCACAAC | | | | |
| 11b | ebola_92 | CcaCas13b | actgtgcacttgaaccattg | actgtgcact | GTTGGAACTGCT | Ebola | 11b |
| | | | cagaggaattG | tgaaccattg | CTCATTTTGGAGG | ssRNA | |
| | | | TTGGAACTGCTCTCATTTTG | cagaggaat | GTAATCACAAC | | |
| | | | GAGGGTAATCACAAC | t | | | |
| 11b | ebola_93 | CcaCas13b | tgactgtgcacttgaaccat | tgactgtgca | GTTGGAACTGCT | Ebola | 11b |
| | | | tgcagaggaa | cttgaaccat | CTCATTTTGGAGG | ssRNA | |
| | | | GTTGGAACTGCTCTCATTTT | tgcagagga | GTAATCACAAC | | |
| | | | GGAGGGTAATCACAAC | a | | | |
| 11b | ebola_94 | CcaCas13b | ttgactgtgcacttgaacca | ttgactgtgc | GTTGGAACTGCT | Ebola | 11b |
| | | | ttgcagaggaG | acttgaacca | CTCATTTTGGAGG | ssRNA | |
| | | | TTGGAACTGCTCTCATTTTG | ttgcagagg | GTAATCACAAC | | |
| | | | GAGGGTAATCACAAC | a | | | |
| 6a | thermo- | LwaCas13a | GATTTAGACTACCCCAAAA | TATCAA | GATTTAGACTAC | thermonu- | 6a |
| | nuclease | | ACGAAGGGGACTAAAACT | CCAATA | CCCAAAAACGAA | clease | |
| | validation | | ATCAACCAATAATAGTCTG | ATAGTC | GGGGACTAAAAC | | |
| | LwaCas13 | | AATGTCAT | TGAATG | | | |
| | a 1 | | | TCAT | | | |
| 6a | thermo- | LwaCas13a | GATTTAGACTACCCCAAAA | ATGTCA | GATTTAGACTAC | thermonu- | 6a |
| | nuclease | | ACGAAGGGGACTAAAACA | TTGGTT | CCCAAAAACGAA | clease | |
| | validation | | TGTCATTGGTTGACCTTTGT | GACCTT | GGGGACTAAAAC | | |
| | LwaCas13 | | ACATTAA | TGTACA | | | |
| | a 2 | | | TTAA | | | |
| 6a | thermo- | LwaCas13a | GATTTAGACTACCCCAAAA | TTAGGA | GATTTAGACTAC | thermo- | 6a |
| | nuclease | | ACGAAGGGGACTAAAACTT | TGCTTT | CCCAAAAACGAA | nuclease | |
| | validation | | AGGATGCTTTGTTTCAGGT | GTTTCA | GGGGACTAAAAC | | |
| | LwaCas13 | | GTATCAA | GGTGTA | | | |
| | a 3 | | | TCAA | | | |
| 6a | thermo- | LwaCas13a | GATTTAGACTACCCCAAAA | TTTCTC | GATTTAGACTAC | thermo- | 6a |
| | nuclease | | ACGAAGGGGACTAAAACTT | TACACC | CCCAAAAACGAA | nuclease | |
| | validation | | TCTCTACACCTTTTTTAGGA | TTTTTT | GGGGACTAAAAC | | |
| | LwaCas13 | | TGCTTT | AGGATG | | | |
| | a 4 | | | CTTT | | | |
| 6a | thermo- | LwaCas13a | GATTTAGACTACCCCAAAA | TGTCAT | GATTTAGACTAC | thermo- | 6a |
| | nuclease | | ACGAAGGGGACTAAAACT | TGGTTG | CCCAAAAACGAA | nuclease | |
| | validation | | GTCATTGGTTGACCTTTGT | ACCTTT | GGGGACTAAAAC | | |
| | LwaCas13 | | ACATTAAT | GTACAT | | | |
| | a 5 | | | TAAT | | | |
| 6a | thermo- | LwaCas13a | GATTTAGACTACCCCAAAA | ATAGTC | GATTTAGACTAC | thermo- | 6a |
| | nuclease | | ACGAAGGGGACTAAAACA | TGAATG | CCCAAAAACGAA | nuclease | |
| | validation | | TAGTCTGAATGTCATTGGT | TCATTG | GGGGACTAAAAC | | |
| | LwaCas13 | | TGACCTTT | GTTGAC | | | |
| | a 6 | | | CTTT | | | |
| 6a | thermo- | LwaCas13a | GATTTAGACTACCCCAAAA | AGTCTG | GATTTAGACTAC | thermo- | 6a |
| | nuclease | | ACGAAGGGGACTAAAACA | AATGTC | CCCAAAAACGAA | nuclease | |
| | validation | | GTCTGAATGTCATTGGTTG | ATTGGT | GGGGACTAAAAC | | |
| | LwaCas13 | | ACCTTTGT | TGACCT | | | |
| | a 7 | | | TTGT | | | |
| 6a | thermo- | LwaCas13a | GATTTAGACTACCCCAAAA | TACATT | GATTTAGACTAC | thermo- | 6a |
| | nuclease | | ACGAAGGGGACTAAAACT | AATTTA | CCCAAAAACGAA | nuclease | |
| | validation | | ACATTAATTTAACAGTATC | ACAGTA | GGGGACTAAAAC | | |
| | LwaCas13 | | ACCATCAA | TCACCA | | | |
| | a 8 | | | TCAA | | | |
| 6a | thermo- | LwaCas13a | GATTTAGACTACCCCAAAA | ATGCTT | GATTTAGACTAC | thermo- | 6a |
| | nuclease | | ACGAAGGGGACTAAAACA | TGTTTC | CCCAAAAACGAA | nuclease | |
| | validation | | TGCTTTGTTTCAGGTGTATC | AGGTGT | GGGGACTAAAAC | | |
| | LwaCas13 | | AACCAAT | ATCAAC | | | |
| | a 9 | | | CAAT | | | |
| 6a | thermo- | LwaCas13a | GATTTAGACTACCCCAAAA | AGGATG | GATTTAGACTAC | thermo- | 6a |
| | nuclease | | ACGAAGGGGACTAAAACA | CTTTGT | CCCAAAAACGAA | nuclease | |
| | validation | | GGATGCTTTGTTTCAGGTG | TTCAGG | GGGGACTAAAAC | | |
| | LwaCas13 | | TATCAACC | TGTATC | | | |
| | a 10 | | | AACC | | | |
| 6a | thermo- | LwaCas13a | GATTTAGACTACCCCAAAA | CATATT | GATTTAGACTAC | thermo- | 6a |
| | nuclease | | ACGAAGGGGACTAAAACC | TCTCTA | CCCAAAAACGAA | nuclease | |
| | validation | | ATATTTCTCTACACCTTTTT | CACCTT | GGGGACTAAAAC | | |
| | LwaCas13 | | TAGGATG | TTTTAG | | | |
| | a 11 | | | GATG | | | |
| 6a | thermo- | LwaCas13a | GATTTAGACTACCCCAAAA | ACCATA | GATTTAGACTAC | thermo- | 6a |
| | nuclease | | ACGAAGGGGACTAAAACA | TTTCTC | CCCAAAAACGAA | nuclease | |
| | validation | | CCATATTTCTCTACACCTTT | TACACC | GGGGACTAAAAC | | |
| | LwaCas13 | | TTTAGGA | TTTTTT | | | |
| | a 12 | | | AGGA | | | |
| 6a | thermo- | LwaCas13a | GATTTAGACTACCCCAAAA | CTTTTT | GATTTAGACTAC | thermo- | 6a |
| | nuclease | | ACGAAGGGGACTAAAACC | TAGGAT | CCCAAAAACGAA | nuclease | |
| | validation | | TTTTTTAGGATGCTTTGTTT | GCTTTG | GGGGACTAAAAC | | |
| | LwaCas13 | | CAGGTGT | TTTCAG | | | |
| | a 13 | | | GTGT | | | |
| 6a | thermo- | LwaCas13a | GATTTAGACTACCCCAAAA | TACACC | GATTTAGACTAC | thermo- | 6a |
| | nuclease | | ACGAAGGGGACTAAAACT | TTTTTT | CCCAAAAACGAA | nuclease | |
| | validation | | ACACCTTTTTTAGGATGCTT | AGGATG | GGGGACTAAAAC | | |
| | LwaCas13 | | TGTTTCA | CTTTGT | | | |
| | a 14 | | | TTCA | | | |
| 6a | thermo- | LwaCas13a | GATTTAGACTACCCCAAAA | TCTTTT | GATTTAGACTAC | thermo- | 6a |
| | nuclease | | ACGAAGGGGACTAAAACT | TCGTAA | CCCAAAAACGAA | nuclease | |
| | validation | | CTTTTTCGTAAATGCACTTG | ATGCAC | GGGGACTAAAAC | | |
| | LwaCas13 | | CTTCAGG | TTGCTT | | | |
| | a 15 | | | CAGG | | | |
| 6a | thermo- | LwaCas13a | GATTTAGACTACCCCAAAA | TTTTCT | GATTTAGACTAC | thermo- | 6a |
| | nuclease | | ACGAAGGGGACTAAAACTT | TTGCAT | CCCAAAAACGAA | nuclease | |
| | validation | | TTCTTTGCATTTTCTACCAT | TTTCTA | GGGGACTAAAAC | | |
| | LwaCas13 | | CTTTTT | CCATCT | | | |
| | a 16 | | | TTTT | | | |
| 6a | thermo- | LwaCas13a | GATTTAGACTACCCCAAAA | TGAATG | GATTTAGACTAC | thermo- | 6a |
| | nuclease | | ACGAAGGGGACTAAAACT | TCATTG | CCCAAAAACGAA | nuclease | |
| | validation | | GAATGTCATTGGTTGACCT | GTTGAC | GGGGACTAAAAC | | |
| | LwaCas13 | | TTGTACAT | CTTTGT | | | |
| | a 17 | | | ACAT | | | |
| 6a | thermo- | LwaCas13a | GATTTAGACTACCCCAAAA | TTTTTT | GATTTAGACTAC | thermo- | 6a |
| | nuclease | | ACGAAGGGGACTAAAACTT | AGGATG | CCCAAAAACGAA | nuclease | |
| | validation | | TTTTAGGATGCTTTGTTTCA | CTTTGT | GGGGACTAAAAC | | |
| | LwaCas13 | | GGTGTA | TTCAGG | | | |
| | a 18 | | | TGTA | | | |
| 6a | thermo- | LwaCas13a | GATTTAGACTACCCCAAAA | TTTGTT | GATTTAGACTAC | thermo- | 6a |
| | nuclease | | ACGAAGGGGACTAAAACTT | TCAGGT | CCCAAAAACGAA | nuclease | |
| | validation | | TGTTTCAGGTGTATCAACC | GTATCA | GGGGACTAAAAC | | |
| | LwaCas13 | | AATAATA | ACCAAT | | | |
| | a 19 | | | AATA | | | |
| 6a | thermo- | LwaCas13a | GATTTAGACTACCCCAAAA | TTGCTT | GATTTAGACTAC | thermo- | 6a |
| | nuclease | | ACGAAGGGGACTAAAACTT | CAGGA | CCCAAAAACGAA | nuclease | |
| | validation | | GCTTCAGGACCATATTTCT | CCATAT | GGGGACTAAAAC | | |
| | LwaCas13 | | CTACACC | TTCTCT | | | |
| | a 20 | | | ACACC | | | |
| 6a | thermo- | LwaCas13a | GATTTAGACTACCCCAAAA | TCAGGT | GATTTAGACTAC | thermo- | 6a |
| | nuclease | | ACGAAGGGGACTAAAACT | GTATCA | CCCAAAAACGAA | nuclease | |
| | validation | | CAGGTGTATCAACCAATAA | ACCAAT | GGGGACTAAAAC | | |
| | LwaCas13 | | TAGTCTGA | AATAGT | | | |
| | a 21 | | | CTGA | | | |
| 6a | thermo- | LwaCas13a | GATTTAGACTACCCCAAAA | ACTTGC | GATTTAGACTAC | thermo- | 6a |
| | nuclease | | ACGAAGGGGACTAAAACA | TTCAGG | CCCAAAAACGAA | nuclease | |
| | validation | | CTTGCTTCAGGACCATATT | ACCATA | GGGGACTAAAAC | | |
| | LwaCas13 | | TCTCTACA | TTTCTC | | | |
| | a 22 | | | TACA | | | |
| 6a | thermo- | LwaCas13a | GATTTAGACTACCCCAAAA | TTTGTT | GATTTAGACTAC | thermo- | 6a |
| | nuclease | | ACGAAGGGGACTAAAACTT | TCAGGT | CCCAAAAACGAA | nuclease | |
| | validation | | TGTTTCAGGTGTATCAACC | GTATCA | GGGGACTAAAAC | | |
| | LwaCas13 | | AATAATA | ACCAAT | | | |
| | a 23 | | | AATA | | | |
| 6a | thermo- | LwaCas13a | GATTTAGACTACCCCAAAA | TCTACA | GATTTAGACTAC | thermo- | 6a |
| | nuclease | | ACGAAGGGGACTAAAACT | CCTTTT | CCCAAAAACGAA | nuclease | |
| | validation | | CTACACCTTTTTTAGGATG | TTAGGA | GGGGACTAAAAC | | |
| | LwaCas13 | | CTTTGTTT | TGCTTT | | | |
| | a 24 | | | GTTT | | | |
| 6a | thermo- | LwaCas13a | GATTTAGACTACCCCAAAA | CTTCAG | GATTTAGACTAC | thermo- | 6a |
| | nuclease | | ACGAAGGGGACTAAAACC | GACCAT | CCCAAAAACGAA | nuclease | |
| | validation | | TTCAGGACCATATTTCTCT | ATTTCT | GGGGACTAAAAC | | |
| | LwaCas13 | | ACACCTTT | CTACAC | | | |
| | a 25 | | | CTTT | | | |
| 6a | thermo- | LwaCas13a | GATTTAGACTACCCCAAAA | TGACCT | GATTTAGACTAC | thermo- | 6a |
| | nuclease | | ACGAAGGGGACTAAAACT | TTGTAC | CCCAAAAACGAA | nuclease | |
| | validation | | GACCTTTGTACATTAATTT | ATTAAT | GGGGACTAAAAC | | |
| | LwaCas13 | | AACAGTAT | TTAACA | | | |
| | a 26 | | | GTAT | | | |
| 6a | thermo- | LwaCas13a | GATTTAGACTACCCCAAAA | ATTGGT | GATTTAGACTAC | thermo- | 6a |
| | nuclease | | ACGAAGGGGACTAAAACA | TGACCT | CCCAAAAACGAA | nuclease | |
| | validation | | TTGGTTGACCTTTGTACATT | TTGTAC | GGGGACTAAAAC | | |
| | LwaCas13 | | AATTTAA | ATTAAT | | | |
| | a 27 | | | TTAA | | | |
| 6a | thermo- | LwaCas13a | GATTTAGACTACCCCAAAA | GTCATT | GATTTAGACTAC | thermo- | 6a |
| | nuclease | | ACGAAGGGGACTAAAACG | GGTTGA | CCCAAAAACGAA | nuclease | |
| | validation | | TCATTGGTTGACCTTTGTAC | CCTTTG | GGGGACTAAAAC | | |
| | LwaCas13 | | ATTAATT | TACATT | | | |
| | a 28 | | | AATT | | | |
| 6a | thermo- | LwaCas13a | GATTTAGACTACCCCAAAA | TTCTCT | GATTTAGACTAC | thermo- | 6a |
| | nuclease | | ACGAAGGGGACTAAAACTT | ACACCT | CCCAAAAACGAA | nuclease | |
| | validation | | CTCTACACCTTTTTTAGGAT | TTTTTA | GGGGACTAAAAC | | |
| | LwaCas13 | | GCTTTG | GGATGC | | | |
| | a 29 | | | TTTG | | | |
| 6a | thermo- | LwaCas13a | GATTTAGACTACCCCAAAA | GCATTT | GATTTAGACTAC | thermo- | 6a |
| | nuclease | | ACGAAGGGGACTAAAACG | TCTACC | CCCAAAAACGAA | nuclease | |
| | validation | | CATTTTCTACCATCTTTTTC | ATCTTT | GGGGACTAAAAC | | |
| | LwaCas13 | | GTAAATG | TTCGTA | | | |
| | a 30 | | | AATG | | | |
| 6a | APML | LwaCas13a | GATTTAGACTACCCCAAAA | GCGCCA | GATTTAGACTAC | APML | 6a |
| | long | | ACGAAGGGGACTAAAACG | CTGGCC | CCCAAAAACGAA | long | |
| | validation | | CGCCACTGGCCACGTGGTT | ACGTGG | GGGGACTAAAAC | | |
| | LwaCas13 | | GCTGTTGG | TTGCTG | | | |
| | a 1 | | | TTGG | | | |
| 6a | APML | LwaCas13a | GATTTAGACTACCCCAAAA | TGGCTG | GATTTAGACTAC | APML | 6a |
| | long | | ACGAAGGGGACTAAAACT | CCTCCC | CCCAAAAACGAA | long | |
| | validation | | GGCTGCCTCCCCGGCGCCA | CGGCGC | GGGGACTAAAAC | | |
| | LwaCas13 | | CTGGCCAC | CACTGG | | | |
| | a 2 | | | CCAC | | | |
| 6a | APML | LwaCas13a | GATTTAGACTACCCCAAAA | CTGCCT | GATTTAGACTAC | APML | 6a |
| | long | | ACGAAGGGGACTAAAACC | CCCCGG | CCCAAAAACGAA | long | |
| | validation | | TGCCTCCCCGGCGCCACTG | CGCCAC | GGGGACTAAAAC | | |
| | LwaCas13 | | GCCACGTG | TGGCCA | | | |
| | a 3 | | | CGTG | | | |
| 6a | APML | LwaCas13a | GATTTAGACTACCCCAAAA | GGCTGC | GATTTAGACTAC | APML | 6a |
| | long | | ACGAAGGGGACTAAAACG | CTCCCC | CCCAAAAACGAA | long | |
| | validation | | GCTGCCTCCCCGGCGCCAC | GGCGCC | GGGGACTAAAAC | | |
| | LwaCas13 | | TGGCCACG | ACTGGC | | | |
| | a 4 | | | CACG | | | |
| 6a | APML | LwaCas13a | GATTTAGACTACCCCAAAA | CCCCGG | GATTTAGACTAC | APML | 6a |
| | long | | ACGAAGGGGACTAAAACC | CGCCAC | CCCAAAAACGAA | long | |
| | validation | | CCCGGCGCCACTGGCCACG | TGGCCA | GGGGACTAAAAC | | |
| | LwaCas13 | | TGGTTGCT | CGTGGT | | | |
| | a 5 | | | TGCT | | | |
| 6a | APML | LwaCas13a | GATTTAGACTACCCCAAAA | GCTGCC | GATTTAGACTAC | APML | 6a |
| | long | | ACGAAGGGGACTAAAACG | TCCCCG | CCCAAAAACGAA | long | |
| | validation | | CTGCCTCCCCGGCGCCACT | GCGCCA | GGGGACTAAAAC | | |
| | LwaCas13 | | GGCCACGT | CTGGCC | | | |
| | a 6 | | | ACGT | | | |
| 6a | APML | LwaCas13a | GATTTAGACTACCCCAAAA | CGCCAC | GATTTAGACTAC | APML | 6a |
| | long | | ACGAAGGGGACTAAAACC | TGGCCA | CCCAAAAACGAA | long | |
| | validation | | GCCACTGGCCACGTGGTTG | CGTGGT | GGGGACTAAAAC | | |
| | LwaCas13 | | CTGTTGGG | TGCTGT | | | |
| | a 7 | | | TGGG | | | |
| 6a | APML | LwaCas13a | GATTTAGACTACCCCAAAA | CGGCGC | GATTTAGACTAC | APML | 6a |
| | long | | ACGAAGGGGACTAAAACC | CACTGG | CCCAAAAACGAA | long | |
| | validation | | GGCGCCACTGGCCACGTGG | CCACGT | GGGGACTAAAAC | | |
| | LwaCas13 | | TTGCTGTT | GGTTGC | | | |
| | a 8 | | | TGTT | | | |
| 6a | APML | LwaCas13a | GATTTAGACTACCCCAAAA | ATGGCT | GATTTAGACTAC | APML | 6a |
| | long | | ACGAAGGGGACTAAAACA | GCCTCC | CCCAAAAACGAA | long | |
| | validation | | TGGCTGCCTCCCCGGCGCC | CCGGCG | GGGGACTAAAAC | | |
| | LwaCas13 | | ACTGGCCA | CCACTG | | | |
| | a 9 | | | GCCA | | | |
| 6a | APML | LwaCas13a | GATTTAGACTACCCCAAAA | CCCGGC | GATTTAGACTAC | APML | 6a |
| | long | | ACGAAGGGGACTAAAACC | GCCACT | CCCAAAAACGAA | long | |
| | validation | | CCGGCGCCACTGGCCACGT | GGCCAC | GGGGACTAAAAC | | |
| | LwaCas13 | | GGTTGCTG | GTGGTT | | | |
| | a 10 | | | GCTG | | | |
| 6a | APML | LwaCas13a | GATTTAGACTACCCCAAAA | AATGGC | GATTTAGACTAC | APML | 6a |
| | long | | ACGAAGGGGACTAAAACA | TGCCTC | CCCAAAAACGAA | long | |
| | validation | | ATGGCTGCCTCCCCGGCGC | CCCGGC | GGGGACTAAAAC | | |
| | LwaCas13 | | CACTGGCC | GCCACT | | | |
| | a 11 | | | GGCC | | | |
| 6a | APML | LwaCas13a | GATTTAGACTACCCCAAAA | CTCCCC | GATTTAGACTAC | APML | 6a |
| | long | | ACGAAGGGGACTAAAACC | GGCGCC | CCCAAAAACGAA | long | |
| | validation | | TCCCCGGCGCCACTGGCCA | ACTGGC | GGGGACTAAAAC | | |
| | LwaCas13 | | CGTGGTTG | CACGTG | | | |
| | a 12 | | | GTTG | | | |
| 6a | APML | LwaCas13a | GATTTAGACTACCCCAAAA | CCTCCC | GATTTAGACTAC | APML | 6a |
| | long | | ACGAAGGGGACTAAAACC | CGGCGC | CCCAAAAACGAA | long | |
| | validation | | CTCCCCGGCGCCACTGGCC | CACTGG | GGGGACTAAAAC | | |
| | LwaCas13 | | ACGTGGTT | CCACGT | | | |
| | a 13 | | | GGTT | | | |
| 6a | APML | LwaCas13a | GATTTAGACTACCCCAAAA | TCAATG | GATTTAGACTAC | APML | 6a |
| | long | | ACGAAGGGGACTAAAACT | GCTGCC | CCCAAAAACGAA | long | |
| | validation | | CAATGGCTGCCTCCCCGGC | TCCCCG | GGGGACTAAAAC | | |
| | LwaCas13 | | GCCACTGG | GCGCCA | | | |
| | a 14 | | | CTGG | | | |
| 6a | APML | LwaCas13a | GATTTAGACTACCCCAAAA | CCGGCG | GATTTAGACTAC | APML | 6a |
| | long | | ACGAAGGGGACTAAAACC | CCACTG | CCCAAAAACGAA | long | |
| | validation | | CGGCGCCACTGGCCACGTG | GCCACG | GGGGACTAAAAC | | |
| | LwaCas13 | | GTTGCTGT | TGGTTG | | | |
| | a 15 | | | CTGT | | | |
| 6a | APML | LwaCas13a | GATTTAGACTACCCCAAAA | CAATGG | GATTTAGACTAC | APML | 6a |
| | long | | ACGAAGGGGACTAAAACC | CTGCCT | CCCAAAAACGAA | long | |
| | validation | | AATGGCTGCCTCCCCGGCG | CCCCGG | GGGGACTAAAAC | | |
| | LwaCas13 | | CCACTGGC | CGCCAC | | | |
| | a 16 | | | TGGC | | | |
| 6a | APML | LwaCas13a | GATTTAGACTACCCCAAAA | TGCCTC | GATTTAGACTAC | APML | 6a |
| | long | | ACGAAGGGGACTAAAACT | CCCGGC | CCCAAAAACGAA | long | |
| | validation | | GCCTCCCCGGCGCCACTGG | GCCACT | GGGGACTAAAAC | | |
| | LwaCas13 | | CCACGTGG | GGCCAC | | | |
| | a 17 | | | GTGG | | | |
| 6a | APML | LwaCas13a | GATTTAGACTACCCCAAAA | TCCCCG | GATTTAGACTAC | APML | 6a |
| | long | | ACGAAGGGGACTAAAACT | GCGCCA | CCCAAAAACGAA | long | |
| | validation | | CCCCGGCGCCACTGGCCAC | CTGGCC | GGGGACTAAAAC | | |
| | LwaCas13 | | GTGGTTGC | ACGTGG | | | |
| | a 18 | | | TTGC | | | |
| 6a | APML | LwaCas13a | GATTTAGACTACCCCAAAA | GGCGCC | GATTTAGACTAC | APML | 6a |
| | long | | ACGAAGGGGACTAAAACG | ACTGGC | CCCAAAAACGAA | long | |
| | validation | | GCGCCACTGGCCACGTGGT | CACGTG | GGGGACTAAAAC | | |
| | LwaCas13 | | TGCTGTTG | GTTGCT | | | |
| | a 19 | | | GTTG | | | |
| 6a | APML | LwaCas13a | GATTTAGACTACCCCAAAA | GCCTCC | GATTTAGACTAC | APML | 6a |
| | long | | ACGAAGGGGACTAAAACG | CCGGCG | CCCAAAAACGAA | long | |
| | validation | | CCTCCCCGGCGCCACTGGC | CCACTG | GGGGACTAAAAC | | |
| | LwaCas13 | | CACGTGGT | GCCACG | | | |
| | a 20 | | | TGGT | | | |
| 6a | APML | LwaCas13a | GATTTAGACTACCCCAAAA | TCTCAA | GATTTAGACTAC | APML | 6a |
| | short | | ACGAAGGGGACTAAAACT | TGGCTT | CCCAAAAACGAA | short | |
| | validation | | CTCAATGGCTTTCCCCTGG | TCCCCT | GGGGACTAAAAC | | |
| | LwaCas13 | | GTGATGCA | GGGTGA | | | |
| | a 1 | | | TGCA | | | |
| 6a | APML | LwaCas13a | GATTTAGACTACCCCAAAA | ATGGCT | GATTTAGACTAC | APML | 6a |
| | short | | ACGAAGGGGACTAAAACA | TTCCCC | CCCAAAAACGAA | short | |
| | validation | | TGGCTTTCCCCTGGGTGAT | TGGGTG | GGGGACTAAAAC | | |
| | LwaCas13 | | GCAAGAGC | ATGCAA | | | |
| | a 2 | | | GAGC | | | |
| 6a | APML | LwaCas13a | GATTTAGACTACCCCAAAA | AATGGC | GATTTAGACTAC | APML | 6a |
| | short | | ACGAAGGGGACTAAAACA | TTTCCC | CCCAAAAACGAA | short | |
| | validation | | ATGGCTTTCCCCTGGGTGA | CTGGGT | GGGGACTAAAAC | | |
| | LwaCas13 | | TGCAAGAG | GATGCA | | | |
| | a 3 | | | AGAG | | | |
| 6a | APML | LwaCas13a | GATTTAGACTACCCCAAAA | GGGTGA | GATTTAGACTAC | APML | 6a |
| | short | | ACGAAGGGGACTAAAACG | TGCAAG | CCCAAAAACGAA | short | |
| | validation | | GGTGATGCAAGAGCTGAG | AGCTGA | GGGGACTAAAAC | | |
| | LwaCas13 | | GTCCTGCAG | GGTCCT | | | |
| | a 4 | | | GCAG | | | |
| 6a | APML | LwaCas13a | GATTTAGACTACCCCAAAA | TGGCTT | GATTTAGACTAC | APML | 6a |
| | short | | ACGAAGGGGACTAAAACT | TCCCCT | CCCAAAAACGAA | short | |
| | validation | | GGCTTTCCCCTGGGTGATG | GGGTGA | GGGGACTAAAAC | | |
| | LwaCas13 | | CAAGAGCT | TGCAAG | | | |
| | a 5 | | | AGCT | | | |
| 6a | APML | LwaCas13a | GATTTAGACTACCCCAAAA | CTCAAT | GATTTAGACTAC | APML | 6a |
| | short | | ACGAAGGGGACTAAAACC | GGCTTT | CCCAAAAACGAA | short | |
| | validation | | TCAATGGCTTTCCCCTGGG | CCCCTG | GGGGACTAAAAC | | |
| | LwaCas13 | | TGATGCAA | GGTGAT | | | |
| | a 6 | | | GCAA | | | |
| 6a | APML | LwaCas13a | GATTTAGACTACCCCAAAA | TTCCCC | GATTTAGACTAC | APML | 6a |
| | short | | ACGAAGGGGACTAAAACTT | TGGGTG | CCCAAAAACGAA | short | |
| | validation | | CCCCTGGGTGATGCAAGAG | ATGCAA | GGGGACTAAAAC | | |
| | LwaCas13 | | CTGAGGT | GAGCTG | | | |
| | a 7 | | | AGGT | | | |
| 6a | APML | LwaCas13a | GATTTAGACTACCCCAAAA | GCTTTC | GATTTAGACTAC | APML | 6a |
| | short | | ACGAAGGGGACTAAAACG | CCCTGG | CCCAAAAACGAA | short | |
| | validation | | CTTTCCCCTGGGTGATGCA | GTGATG | GGGGACTAAAAC | | |
| | LwaCas13 | | AGAGCTGA | CAAGA | | | |
| | a 8 | | | GCTGA | | | |
| 6a | APML | LwaCas13a | GATTTAGACTACCCCAAAA | TCCCCT | GATTTAGACTAC | APML | 6a |
| | short | | ACGAAGGGGACTAAAACT | GGGTGA | CCCAAAAACGAA | short | |
| | validation | | CCCCTGGGTGATGCAAGAG | TGCAAG | GGGGACTAAAAC | | |
| | LwaCas13 | | CTGAGGTC | AGCTGA | | | |
| | a 9 | | | GGTC | | | |
| 6a | APML | LwaCas13a | GATTTAGACTACCCCAAAA | CTTTCC | GATTTAGACTAC | APML | 6a |
| | short | | ACGAAGGGGACTAAAACC | CCTGGG | CCCAAAAACGAA | short | |
| | validation | | TTTCCCCTGGGTGATGCAA | TGATGC | GGGGACTAAAAC | | |
| | LwaCas13 | | GAGCTGAG | AAGAG | | | |
| | a 10 | | | CTGAG | | | |
| 6a | APML | LwaCas13a | GATTTAGACTACCCCAAAA | CAATGG | GATTTAGACTAC | APML | 6a |
| | short | | ACGAAGGGGACTAAAACC | CTTTCC | CCCAAAAACGAA | short | |
| | validation | | AATGGCTTTCCCCTGGGTG | CCTGGG | GGGGACTAAAAC | | |
| | LwaCas13 | | ATGCAAGA | TGATGC | | | |
| | a 11 | | | AAGA | | | |
| 6a | APML | LwaCas13a | GATTTAGACTACCCCAAAA | CCTGGG | GATTTAGACTAC | APML | 6a |
| | short | | ACGAAGGGGACTAAAACC | TGATGC | CCCAAAAACGAA | short | |
| | validation | | CTGGGTGATGCAAGAGCTG | AAGAG | GGGGACTAAAAC | | |
| | LwaCas13 | | AGGTCCTG | CTGAGG | | | |
| | a 12 | | | TCCTG | | | |
| 6a | APML | LwaCas13a | GATTTAGACTACCCCAAAA | GGTCTC | GATTTAGACTAC | APML | 6a |
| | short | | ACGAAGGGGACTAAAACG | AATGGC | CCCAAAAACGAA | short | |
| | validation | | GTCTCAATGGCTTTCCCCT | TTTCCC | GGGGACTAAAAC | | |
| | LwaCas13 | | GGGTGATG | CTGGGT | | | |
| | a 13 | | | GATG | | | |
| 6a | APML | LwaCas13a | GATTTAGACTACCCCAAAA | GGGTCT | GATTTAGACTAC | APML | 6a |
| | short | | ACGAAGGGGACTAAAACG | CAATGG | CCCAAAAACGAA | short | |
| | validation | | GGTCTCAATGGCTTTCCCC | CTTTCC | GGGGACTAAAAC | | |
| | LwaCas13 | | TGGGTGAT | CCTGGG | | | |
| | a 14 | | | TGAT | | | |
| 6a | APML | LwaCas13a | GATTTAGACTACCCCAAAA | GGCTTT | GATTTAGACTAC | APML | 6a |
| | short | | ACGAAGGGGACTAAAACG | CCCCTG | CCCAAAAACGAA | short | |
| | validation | | GCTTTCCCCTGGGTGATGC | GGTGAT | GGGGACTAAAAC | | |
| | LwaCas13 | | AAGAGCTG | GCAAG | | | |
| | a 15 | | | AGCTG | | | |
| 6a | APML | LwaCas13a | GATTTAGACTACCCCAAAA | TTTCCC | GATTTAGACTAC | APML | 6a |
| | short | | ACGAAGGGGACTAAAACTT | CTGGGT | CCCAAAAACGAA | short | |
| | validation | | TCCCCTGGGTGATGCAAGA | GATGCA | GGGGACTAAAAC | | |
| | LwaCas13 | | GCTGAGG | AGAGCT | | | |
| | a 16 | | | GAGG | | | |
| 6a | APML | LwaCas13a | GATTTAGACTACCCCAAAA | CCCCTG | GATTTAGACTAC | APML | 6a |
| | short | | ACGAAGGGGACTAAAACC | GGTGAT | CCCAAAAACGAA | short | |
| | validation | | CCCTGGGTGATGCAAGAGC | GCAAG | GGGGACTAAAAC | | |
| | LwaCas13 | | TGAGGTCC | AGCTGA | | | |
| | a 17 | | | GGTCC | | | |
| 6a | APML | LwaCas13a | GATTTAGACTACCCCAAAA | TGGGTG | GATTTAGACTAC | APML | 6a |
| | short | | ACGAAGGGGACTAAAACT | ATGCAA | CCCAAAAACGAA | short | |
| | validation | | GGGTGATGCAAGAGCTGA | GAGCTG | GGGGACTAAAAC | | |
| | LwaCas13 | | GGTCCTGCA | AGGTCC | | | |
| | a 18 | | | TGCA | | | |
| 6a | APML | LwaCas13a | GATTTAGACTACCCCAAAA | GTCTCA | GATTTAGACTAC | APML | 6a |
| | short | | ACGAAGGGGACTAAAACG | ATGGCT | CCCAAAAACGAA | short | |
| | validation | | TCTCAATGGCTTTCCCCTG | TTCCCC | GGGGACTAAAAC | | |
| | LwaCas13 | | GGTGATGC | TGGGTG | | | |
| | a 19 | | | ATGC | | | |
| 6a | APML | LwaCas13a | GATTTAGACTACCCCAAAA | CTGGGT | GATTTAGACTAC | APML | 6a |
| | short | | ACGAAGGGGACTAAAACC | GATGCA | CCCAAAAACGAA | short | |
| | validation | | TGGGTGATGCAAGAGCTGA | AGAGCT | GGGGACTAAAAC | | |
| | LwaCas13 | | GGTCCTGC | GAGGTC | | | |
| | a 20 | | | CTGC | | | |
| 6a | APML | LwaCas13a | GATTTAGACTACCCCAAAA | CCCTGG | GATTTAGACTAC | APML | 6a |
| | short | | ACGAAGGGGACTAAAACC | GTGATG | CCCAAAAACGAA | short | |
| | validation | | CCTGGGTGATGCAAGAGCT | CAAGA | GGGGACTAAAAC | | |
| | LwaCas13 | | GAGGTCCT | GCTGAG | | | |
| | a 21 | | | GTCCT | | | |
| 6a | APML | LwaCas13a | GATTTAGACTACCCCAAAA | TCAATG | GATTTAGACTAC | APML | 6a |
| | short | | ACGAAGGGGACTAAAACT | GCTTTC | CCCAAAAACGAA | short | |
| | validation | | CAATGGCTTTCCCCTGGGT | CCCTGG | GGGGACTAAAAC | | |
| | LwaCas13 | | GATGCAAG | GTGATG | | | |
| | a 22 | | | CAAG | | | |
| 6a | APML | LwaCas13a | GATTTAGACTACCCCAAAA | TGGGTC | GATTTAGACTAC | APML | 6a |
| | short | | ACGAAGGGGACTAAAACT | TCAATG | CCCAAAAACGAA | short | |
| | validation | | GGGTCTCAATGGCTTTCCC | GCTTTC | GGGGACTAAAAC | | |
| | LwaCas13 | | CTGGGTGA | CCCTGG | | | |
| | a 23 | | | GTGA | | | |
| 6b | APML | CcaCas13b | cggcgccactggccacgtg | cggcgccac | GTTGGAACTGCT | APML | 6b |
| | long | | gttgctgttgg | tggccacgt | CTCATTTTGGAGG | long | |
| | validation | | GTTGGAACTGCTCTCATTTT | ggttgctgtt | GTAATCACAAC | | |
| | CcaCas13 | | GGAGGGTAATCACAAC | gg | | | |
| | b 1 | | | | | | |
| 6b | APML | CcaCas13b | ccggcgccactggccacgt | ccggcgcca | GTTGGAACTGCT | APML | 6b |
| | long | | ggttgctgttg | ctggccacg | CTCATTTTGGAGG | long | |
| | validation | | GTTGGAACTGCTCTCATTTT | tggttgctgtt | GTAATCACAAC | | |
| | CcaCas13 | | GGAGGGTAATCACAAC | g | | | |
| | b 2 | | | | | | |
| 6b | APML | CcaCas13b | cccggcgccactggccacg | GTTGGAACTGCT | cccggcgcc | APML | 6b |
| | long | | tggttgctgtt | actggccac | CTCATTTTGGAGG | long | |
| | validation | | GTTGGAACTGCTCTCATTTT | gtggttgctg | GTAATCACAAC | | |
| | CcaCas13 | | GGAGGGTAATCACAAC | tt | | | |
| | b 3 | | | | | | |
| 6b | APML | CcaCas13b | ccccggcgccactggccac | ccccggcgc | GTTGGAACTGCT | APML | 6b |
| | long | | gtggttgctgt | cactggcca | CTCATTTTGGAGG | long | |
| | validation | | GTTGGAACTGCTCTCATTTT | cgtggttgct | GTAATCACAAC | | |
| | CcaCas13 | | GGAGGGTAATCACAAC | gt | | | |
| | b 4 | | | | | | |
| 6b | APML | CcaCas13b | tccccggcgccactggcca | tccccggcg | GTTGGAACTGCT | APML | 6b |
| | long | | cgtggttgctg | ccactggcc | CTCATTTTGGAGG | long | |
| | validation | | GTTGGAACTGCTCTCATTTT | acgtggttgc | GTAATCACAAC | | |
| | CcaCas13 | | GGAGGGTAATCACAAC | tg | | | |
| | b 5 | | | | | | |
| 6b | APML | CcaCas13b | ctccccggcgccactggcc | ctccccggc | GTTGGAACTGCT | APML | 6b |
| | long | | acgtggttgct | gccactggc | CTCATTTTGGAGG | long | |
| | validation | | GTTGGAACTGCTCTCATTTT | cacgtggttg | GTAATCACAAC | | |
| | CcaCas13 | | GGAGGGTAATCACAAC | ct | | | |
| | b 6 | | | | | | |
| 6b | APML | CcaCas13b | cctccccggcgccactggc | cctccccgg | GTTGGAACTGCT | APML | 6b |
| | long | | cacgtggttgc | cgccactgg | CTCATTTTGGAGG | long | |
| | validation | | GTTGGAACTGCTCTCATTTT | ccacgtggtt | GTAATCACAAC | | |
| | CcaCas13 | | GGAGGGTAATCACAAC | gc | | | |
| | b 7 | | | | | | |
| 6b | APML | CcaCas13b | gcctccccggcgccactgg | gcctccccg | GTTGGAACTGCT | APML | 6b |
| | long | | ccacgtggttg | gcgccactg | CTCATTTTGGAGG | long | |
| | validation | | GTTGGAACTGCTCTCATTTT | gccacgtgg | GTAATCACAAC | | |
| | CcaCas13 | | GGAGGGTAATCACAAC | ttg | | | |
| | b 8 | | | | | | |
| 6b | APML | CcaCas13b | tgcctccccggcgccactg | tgcctccccg | GTTGGAACTGCT | APML | 6b |
| | long | | gccacgtggtt | gcgccactg | CTCATTTTGGAGG | long | |
| | validation | | GTTGGAACTGCTCTCATTTT | gccacgtgg | GTAATCACAAC | | |
| | CcaCas13 | | GGAGGGTAATCACAAC | tt | | | |
| | b 9 | | | | | | |
| 6b | APML | CcaCas13b | ctgcctccccggcgccact | ctgcctcccc | GTTGGAACTGCT | APML | 6b |
| | long | | ggccacgtggt | ggcgccact | CTCATTTTGGAGG | long | |
| | validation | | GTTGGAACTGCTCTCATTTT | ggccacgtg | GTAATCACAAC | | |
| | CcaCas 13 | | GGAGGGTAATCACAAC | gt | | | |
| | b 10 | | | | | | |
| 6b | APML | CcaCas13b | gctgcctccccggcgccac | gctgcctccc | GTTGGAACTGCT | APML | 6b |
| | long | | tggccacgtgg | cggcgccac | CTCATTTTGGAGG | long | |
| | validation | | GTTGGAACTGCTCTCATTTT | tggccacgt | GTAATCACAAC | | |
| | CcaCas13 | | GGAGGGTAATCACAAC | gg | | | |
| | b 11 | | | | | | |
| 6b | APML | CcaCas13b | ggctgcctccccggcgcca | ggctgcctc | GTTGGAACTGCT | APML | 6b |
| | long | | ctggccacgtg | cccggcgcc | CTCATTTTGGAGG | long | |
| | validation | | GTTGGAACTGCTCTCATTTT | actggccac | GTAATCACAAC | | |
| | CcaCas13 | | GGAGGGTAATCACAAC | gtg | | | |
| | b 12 | | | | | | |
| 6b | APML | CcaCas13b | tggctgcctccccggcgcc | tggctgcctc | GTTGGAACTGCT | APML | 6b |
| | long | | actggccacgt | cccggcgcc | CTCATTTTGGAGG | long | |
| | validation | | GTTGGAACTGCTCTCATTTT | actggccac | GTAATCACAAC | | |
| | CcaCas13 | | GGAGGGTAATCACAAC | gt | | | |
| | b 13 | | | | | | |
| 6b | APML | CcaCas13b | atggctgcctccccggcgc | atggctgcct | GTTGGAACTGCT | APML | 6b |
| | long | | cactggccacg | ccccggcgc | CTCATTTTGGAGG | long | |
| | validation | | GTTGGAACTGCTCTCATTTT | cactggcca | GTAATCACAAC | | |
| | CcaCas13 | | GGAGGGTAATCACAAC | cg | | | |
| | b 14 | | | | | | |
| 6b | APML | CcaCas13b | aatggctgcctccccggcg | aatggctgc | GTTGGAACTGCT | APML | 6b |
| | long | | ccactggccac | ctccccggc | CTCATTTTGGAGG | long | |
| | validation | | GTTGGAACTGCTCTCATTTT | gccactggc | GTAATCACAAC | | |
| | CcaCas13 | | GGAGGGTAATCACAAC | cac | | | |
| | b 15 | | | | | | |
| 6b | APML | CcaCas13b | caatggctgcctccccggc | caatggctg | GTTGGAACTGCT | APML | 6b |
| | long | | gccactggcca | cctccccgg | CTCATTTTGGAGG | long | |
| | validation | | GTTGGAACTGCTCTCATTTT | cgccactgg | GTAATCACAAC | | |
| | CcaCas13 | | GGAGGGTAATCACAAC | cca | | | |
| | b 16 | | | | | | |
| 6b | APML | CcaCas13b | ctgggtgatgcaagagctg | ctgggtgatg | GTTGGAACTGCT | APML | 6b |
| | short | | aggtcctgcag | caagagctg | CTCATTTTGGAGG | short | |
| | validation | | GTTGGAACTGCTCTCATTTT | aggtcctgc | GTAATCACAAC | | |
| | CcaCas13 | | GGAGGGTAATCACAAC | ag | | | |
| | b 1 | | | | | | |
| 6b | APML | CcaCas13b | cctgggtgatgcaagagct | cctgggtgat | GTTGGAACTGCT | APML | 6b |
| | short | | gaggtcctgca | gcaagagct | CTCATTTTGGAGG | short | |
| | validation | | GTTGGAACTGCTCTCATTTT | gaggtcctg | GTAATCACAAC | | |
| | CcaCas13 | | GGAGGGTAATCACAAC | ca | | | |
| | b 2 | | | | | | |
| 6b | APML | CcaCas13b | ccctgggtgatgcaagagc | ccctgggtg | GTTGGAACTGCT | APML | 6b |
| | short | | tgaggtcctgc | atgcaagag | CTCATTTTGGAGG | short | |
| | validation | | GTTGGAACTGCTCTCATTTT | ctgaggtcct | GTAATCACAAC | | |
| | CcaCas13 | | GGAGGGTAATCACAAC | gc | | | |
| | b 3 | | | | | | |
| 6b | APML | CcaCas13b | cccctgggtgatgcaagag | cccctgggt | GTTGGAACTGCT | APML | 6b |
| | short | | ctgaggtcctg | gatgcaaga | CTCATTTTGGAGG | short | |
| | validation | | GTTGGAACTGCTCTCATTTT | gctgaggtc | GTAATCACAAC | | |
| | CcaCas13 | | GGAGGGTAATCACAAC | ctg | | | |
| | b 4 | | | | | | |
| 6b | APML | CcaCas13b | tcccctgggtgatgcaaga | tcccctgggt | GTTGGAACTGCT | APML | 6b |
| | short | | gctgaggtcct | gatgcaaga | CTCATTTTGGAGG | short | |
| | validation | | GTTGGAACTGCTCTCATTTT | gctgaggtc | GTAATCACAAC | | |
| | CcaCas13 | | GGAGGGTAATCACAAC | ct | | | |
| | b 5 | | | | | | |
| 6b | APML | CcaCas13b | ttcccctgggtgatgcaag | ttcccctggg | GTTGGAACTGCT | APML | 6b |
| | short | | agctgaggtcc | tgatgcaag | CTCATTTTGGAGG | short | |
| | validation | | GTTGGAACTGCTCTCATTTT | agctgaggt | GTAATCACAAC | | |
| | CcaCas13 | | GGAGGGTAATCACAAC | cc | | | |
| | b 6 | | | | | | |
| 6b | APML | CcaCas13b | tttcccctgggtgatgcaa | gagctgaggtc | GTTGGAACTGCT | APML | 6b |
| | short | | tttcccctgg | gtgatgcaa | CTCATTTTGGAGG | short | |
| | validation | | GTTGGAACTGCTCTCATTTT | gagctgagg | GTAATCACAAC | | |
| | CcaCas13 | | GGAGGGTAATCACAAC | tc | | | |
| | b 7 | | | | | | |
| 6b | APML | CcaCas13b | ctttcccctgggtgatgca | ctttcccctg | GTTGGAACTGCT | APML | 6b |
| | short | | agagctgaggt | ggtgatgca | CTCATTTTGGAGG | short | |
| | validation | | GTTGGAACTGCTCTCATTTT | agagctgag | GTAATCACAAC | | |
| | CcaCas13 | | GGAGGGTAATCACAAC | gt | | | |
| | b 8 | | | | | | |
| 6b | APML | CcaCas13b | gctttcccctgggtgatgc | gctttcccct | GTTGGAACTGCT | APML | 6b |
| | short | | aagagctgagg | gggtgatgc | CTCATTTTGGAGG | short | |
| | validation | | GTTGGAACTGCTCTCATTTT | aagagctga | GTAATCACAAC | | |
| | CcaCas13 | | GGAGGGTAATCACAAC | gg | | | |
| | b 9 | | | | | | |
| 6b | APML | CcaCas13b | ggctttcccctgggtgatg | ggctttcccc | GTTGGAACTGCT | APML | 6b |
| | short | | caagagctgag | tgggtgatgc | CTCATTTTGGAGG | short | |
| | validation | | GTTGGAACTGCTCTCATTTT | aagagctga | GTAATCACAAC | | |
| | CcaCas13 | | GGAGGGTAATCACAAC | g | | | |
| | b 10 | | | | | | |
| 6b | APML | CcaCas13b | tggctttcccctgggtgat | tggctttccc | GTTGGAACTGCT | APML | 6b |
| | short | | gcaagagctga | ctgggtgatg | CTCATTTTGGAGG | short | |
| | validation | | GTTGGAACTGCTCTCATTTT | caagagctg | GTAATCACAAC | | |
| | CcaCas13 | | GGAGGGTAATCACAAC | a | | | |
| | b 11 | | | | | | |
| 6b | APML | CcaCas13b | atggctttcccctgggtga | atggctttcc | GTTGGAACTGCT | APML | 6b |
| | short | | tgcaagagctg | cctgggtgat | CTCATTTTGGAGG | short | |
| | validation | | GTTGGAACTGCTCTCATTTT | gcaagagct | GTAATCACAAC | | |
| | CcaCas13 | | GGAGGGTAATCACAAC | g | | | |
| | b 12 | | | | | | |
| 6b | APML | CcaCas13b | aatggctttcccctgggtg | aatggctttc | GTTGGAACTGCT | APML | 6b |
| | short | | atgcaagagctG | ccctgggtg | CTCATTTTGGAGG | short | |
| | validation | | TTGGAACTGCTCTCATTTTG | atgcaagag | GTAATCACAAC | | |
| | CcaCas13 | | GAGGGTAATCACAAC | ct | | | |
| | b 13 | | | | | | |
| 6b | APML | CcaCas13b | caatggctttcccctgggt | caatggcttt | GTTGGAACTGCT | APML | 6b |
| | short | | gatgcaagagc | cccctgggt | CTCATTTTGGAGG | short | |
| | validation | | GTTGGAACTGCTCTCATTTT | gatgcaaga | GTAATCACAAC | | |
| | CcaCas13 | | GGAGGGTAATCACAAC | gc | | | |
| | b 14 | | | | | | |
| 6b | APML | CcaCas13b | tcaatggctttcccctggg | tcaatggcttt | GTTGGAACTGCT | APML | 6b |
| | short | | tgatgcaagagG | cccctgggt | CTCATTTTGGAGG | short | |
| | validation | | TTGGAACTGCTCTCATTTTG | gatgcaaga | GTAATCACAAC | | |
| | CcaCas13 | | GAGGGTAATCACAAC | g | | | |
| | b 15 | | | | | | |
| 6b | APML | CcaCas13b | ctcaatggctttcccctgg | ctcaatggct | GTTGGAACTGCT | APML | 6b |
| | short | | gtgatgcaagaG | ttcccctggg | CTCATTTTGGAGG | short | |
| | validation | | TTGGAACTGCTCTCATTTTG | tgatgcaag | GTAATCACAAC | | |
| | CcaCas13 | | GAGGGTAATCACAAC | a | | | |
| | b 16 | | | | | | |
| 6b | APML | CcaCas13b | tctcaatggctttcccctg | tctcaatggc | GTTGGAACTGCT | APML | 6b |
| | short | | ggtgatgcaagG | tttcccctgg | CTCATTTTGGAGG | short | |
| | validation | | TTGGAACTGCTCTCATTTTG | gtgatgcaa | GTAATCACAAC | | |
| | CcaCas13 | | GAGGGTAATCACAAC | g | | | |
| | b 17 | | | | | | |
| 6b | APML | CcaCas13b | gtctcaatggctttcccct | gtctcaatgg | GTTGGAACTGCT | APML | 6b |
| | short | | gggtgatgcaaG | ctttcccctg | CTCATTTTGGAGG | short | |
| | validation | | TTGGAACTGCTCTCATTTTG | ggtgatgca | GTAATCACAAC | | |
| | CcaCas13 | | GAGGGTAATCACAAC | a | | | |
| | b 18 | | | | | | |
| 6b | APML | CcaCas13b | ggtctcaatggctttcccc | ggtctcaatg | GTTGGAACTGCT | APML | 6b |
| | short | | tgggtgatgcaG | gctttcccct | CTCATTTTGGAGG | short | |
| | validation | | TTGGAACTGCTCTCATTTTG | gggtgatgc | GTAATCACAAC | | |
| | CcaCas13 | | GAGGGTAATCACAAC | a | | | |
| | b 19 | | | | | | |
| 6b | APML | CcaCas13b | gggtctcaatggctttccc | gggtctcaat | GTTGGAACTGCT | APML | 6b |
| | short | | ctgggtgatgcG | ggctttcccc | CTCATTTTGGAGG | short | |
| | validation | | TTGGAACTGCTCTCATTTTG | tgggtgatgc | GTAATCACAAC | | |
| | CcaCas13 | | GAGGGTAATCACAAC | | | | |
| | b 20 | | | | | | |
| 6b | APML | CcaCas13b | tgggtctcaatggctttcc | tgggtctcaa | GTTGGAACTGCT | APML | 6b |
| | short | | cctgggtgatgG | tggctttccc | CTCATTTTGGAGG | short | |
| | validation | | TTGGAACTGCTCTCATTTTG | ctgggtgatg | GTAATCACAAC | | |
| | CcaCas13 | | GAGGGTAATCACAAC | | | | |
| | b 21 | | | | | | |
| 6b | APML | CcaCas13b | ctgggtctcaatggctttc | ctgggtctca | GTTGGAACTGCT | APML | 6b |
| | short | | ccctgggtgatG | atggctttcc | CTCATTTTGGAGG | short | |
| | validation | | TTGGAACTGCTCTCATTTTG | cctgggtgat | GTAATCACAAC | | |
| | CcaCas13 | | GAGGGTAATCACAAC | | | | |
| | b 22 | | | | | | |
| 6b | Thermo- | CcaCas13b | tcattggttgacctttgta | tcattggttga | GTTGGAACTGCT | Thermo- | 6b |
| | nuclease | | cattaatttaaGTT | cctttgtacat | CTCATTTTGGAGG | nuclease | |
| | validation | | GGAACTGCTCTCATTTTGG | taatttaa | GTAATCACAAC | | |
| | CcaCas13 | | AGGGTAATCACAAC | | | | |
| | b 1 | | | | | | |
| 6b | Thermo- | CcaCas13b | tgtcattggttgacctttg | tgtcattggtt | GTTGGAACTGCT | Thermo- | 6b |
| | nuclease | | tacattaatttGTT | gacctttgta | CTCATTTTGGAGG | nuclease | |
| | validation | | GGAACTGCTCTCATTTTGG | cattaattt | GTAATCACAAC | | |
| | CcaCas13 | | AGGGTAATCACAAC | | | | |
| | b 2 | | | | | | |
| 6b | Thermo- | CcaCas13b | aatgtcattggttgacctt | aatgtcattg | GTTGGAACTGCT | Thermo- | 6b |
| | nuclease | | tgtacattaatGT | gttgacctttg | CTCATTTTGGAGG | nuclease | |
| | validation | | TGGAACTGCTCTCATTTTG | tacattaat | GTAATCACAAC | | |
| | CcaCas13 | | GAGGGTAATCACAAC | | | | |
| | b 3 | | | | | | |
| 6b | Thermo- | CcaCas13b | tgaatgtcattggttgacc | tgaatgtcatt | GTTGGAACTGCT | Thermo- | 6b |
| | nuclease | | tttgtacattaGT | ggttgaccttt | CTCATTTTGGAGG | nuclease | |
| | validation | | TGGAACTGCTCTCATTTTG | gtacatta | GTAATCACAAC | | |
| | CcaCas13 | | GAGGGTAATCACAAC | | | | |
| | b 4 | | | | | | |
| 6b | Thermo- | CcaCas13b | tctgaatgtcattggttga | tctgaatgtc | GTTGGAACTGCT | Thermo- | 6b |
| | nuclease | | cctttgtacatGT | attggttgac | CTCATTTTGGAGG | nuclease | |
| | validation | | TGGAACTGCTCTCATTTTG | ctttgtacat | GTAATCACAAC | | |
| | CcaCas13 | | GAGGGTAATCACAAC | | | | |
| | b 5 | | | | | | |
| 6b | Thermo- | CcaCas13b | agtctgaatgtcattggtt | agtctgaatg | GTTGGAACTGCT | Thermo- | 6b |
| | nuclease | | gacctttgtacGT | tcattggttga | CTCATTTTGGAGG | nuclease | |
| | validation | | TGGAACTGCTCTCATTTTG | cctttgtac | GTAATCACAAC | | |
| | CcaCas13 | | GAGGGTAATCACAAC | | | | |
| | b 6 | | | | | | |
| 6b | Thermo- | CcaCas13b | atagtctgaatgtcattgg | atagtctgaa | GTTGGAACTGCT | Thermo- | 6b |
| | nuclease | | ttgacctttgtGT | tgtcattggtt | CTCATTTTGGAGG | nuclease | |
| | validation | | TGGAACTGCTCTCATTTTG | gacctttgt | GTAATCACAAC | | |
| | CcaCas13 | | GAGGGTAATCACAAC | | | | |
| | b 7 | | | | | | |
| 6b | Thermo- | CcaCas13b | taatagtctgaatgtcatt | taatagtctg | GTTGGAACTGCT | Thermo- | 6b |
| | nuclease | | ggttgacctttGT | aatgtcattg | CTCATTTTGGAGG | nuclease | |
| | validation | | TGGAACTGCTCTCATTTTG | gttgaccttt | GTAATCACAAC | | |
| | CcaCas13 | | GAGGGTAATCACAAC | | | | |
| | b 8 | | | | | | |
| 6b | Thermo- | CcaCas13b | aataatagtctgaatgtca | aataatagtc | GTTGGAACTGCT | Thermo- | 6b |
| | nuclease | | ttggttgacctGT | tgaatgtcatt | CTCATTTTGGAGG | nuclease | |
| | validation | | TGGAACTGCTCTCATTTTG | ggttgacct | GTAATCACAAC | | |
| | CcaCas13 | | GAGGGTAATCACAAC | | | | |
| | b 9 | | | | | | |
| 6b | Thermo- | CcaCas13b | ccaataatagtctgaatgt | ccaataatag | GTTGGAACTGCT | Thermo- | 6b |
| | nuclease | | cattggttgacG | tctgaatgtc | CTCATTTTGGAGG | nuclease | |
| | validation | | TTGGAACTGCTCTCATTTTG | attggttgac | GTAATCACAAC | | |
| | CcaCas13 | | GAGGGTAATCACAAC | | | | |
| | b 10 | | | | | | |
| 6b | Thermo- | CcaCas13b | aaccaataatagtctgaat | aaccaataat | GTTGGAACTGCT | Thermo- | 6b |
| | nuclease | | gtcattggttgG | agtctgaatg | CTCATTTTGGAGG | nuclease | |
| | validation | | TTGGAACTGCTCTCATTTTG | tcattggttg | GTAATCACAAC | | |
| | CcaCas13 | | GAGGGTAATCACAAC | | | | |
| | b 11 | | | | | | |
| 6b | Thermo- | CcaCas13b | tcaaccaataatagtctga | tcaaccaata | GTTGGAACTGCT | Thermo- | 6b |
| | nuclease | | atgtcattggtG | atagtctgaa | CTCATTTTGGAGG | nuclease | |
| | validation | | TTGGAACTGCTCTCATTTTG | tgtcattggt | GTAATCACAAC | | |
| | CcaCas13 | | GAGGGTAATCACAAC | | | | |
| | b 12 | | | | | | |
| 6b | Thermo- | CcaCas13b | tatcaaccaataatagtct | tatcaaccaa | GTTGGAACTGCT | Thermo- | 6b |
| | nuclease | | gaatgtcattgGT | taatagtctg | CTCATTTTGGAGG | nuclease | |
| | validation | | TGGAACTGCTCTCATTTTG | aatgtcattg | GTAATCACAAC | | |
| | CcaCas13 | | GAGGGTAATCACAAC | | | | |
| | b 13 | | | | | | |
| 6b | Thermo- | CcaCas13b | tgtatcaaccaataatagt | tgtatcaacc | GTTGGAACTGCT | Thermo- | 6b |
| | nuclease | | ctgaatgtcatGT | aataatagtc | CTCATTTTGGAGG | nuclease | |
| | validation | | TGGAACTGCTCTCATTTTG | tgaatgtcat | GTAATCACAAC | | |
| | CcaCas13 | | GAGGGTAATCACAAC | | | | |
| | b 14 | | | | | | |
| 6b | Thermo- | CcaCas13b | ggtgtatcaaccaataata | ggtgtatcaa | GTTGGAACTGCT | Thermo- | 6b |
| | nuclease | | gtctgaatgtcG | ccaataatag | CTCATTTTGGAGG | nuclease | |
| | validation | | TTGGAACTGCTCTCATTTTG | tctgaatgtc | GTAATCACAAC | | |
| | CcaCas13 | | GAGGGTAATCACAAC | | | | |
| | b 15 | | | | | | |
| 6b | Thermo- | CcaCas13b | caggtgtatcaaccaataa | caggtgtatc | GTTGGAACTGCT | Thermo- | 6b |
| | nuclease | | tagtctgaatgG | aaccaataat | CTCATTTTGGAGG | nuclease | |
| | validation | | TTGGAACTGCTCTCATTTTG | agtctgaatg | GTAATCACAAC | | |
| | CcaCas13 | | GAGGGTAATCACAAC | | | | |
| | b 16 | | | | | | |
| 6b | Thermo- | CcaCas13b | ttcaggtgtatcaaccaat | ttcaggtgtat | GTTGGAACTGCT | Thermo- | 6b |
| | nuclease | | aatagtctgaaG | caaccaata | CTCATTTTGGAGG | nuclease | |
| | validation | | TTGGAACTGCTCTCATTTTG | atagtctgaa | GTAATCACAAC | | |
| | CcaCas13 | | GAGGGTAATCACAAC | | | | |
| | b 17 | | | | | | |
| 6b | Thermo- | CcaCas13b | gtttcaggtgtatcaacca | gtttcaggtg | GTTGGAACTGCT | Thermo- | 6b |
| | nuclease | | ataatagtctgG | tatcaaccaa | CTCATTTTGGAGG | nuclease | |
| | validation | | TTGGAACTGCTCTCATTTTG | taatagtctg | GTAATCACAAC | | |
| | CcaCas13 | | GAGGGTAATCACAAC | | | | |
| | b 18 | | | | | | |
| 6b | Thermo- | CcaCas13b | ttgtttcaggtgtatcaac | ttgtttcaggt | GTTGGAACTGCT | Thermo- | 6b |
| | nuclease | | caataatagtcGT | gtatcaacca | CTCATTTTGGAGG | nuclease | |
| | validation | | TGGAACTGCTCTCATTTTG | ataatagtc | GTAATCACAAC | | |
| | CcaCas13 | | GAGGGTAATCACAAC | | | | |
| | b 19 | | | | | | |
| 6b | Thermo- | CcaCas13b | ctttgtttcaggtgtatca | ctttgtttcag | GTTGGAACTGCT | Thermo- | 6b |
| | nuclease | | accaataatagGT | gtgtatcaac | CTCATTTTGGAGG | nuclease | |
| | validation | | TGGAACTGCTCTCATTTTG | caataatag | GTAATCACAAC | | |
| | CcaCas13 | | GAGGGTAATCACAAC | | | | |
| | b 20 | | | | | | |
| 6b | Thermo- | CcaCas13b | tgctttgtttcaggtgtat | tgctttgtttc | GTTGGAACTGCT | Thermo- | 6b |
| | nuclease | | caaccaataatGT | aggtgtatca | CTCATTTTGGAGG | nuclease | |
| | validation | | TGGAACTGCTCTCATTTTG | accaataat | GTAATCACAAC | | |
| | CcaCas13 | | GAGGGTAATCACAAC | | | | |
| | b 21 | | | | | | |
| 6b | Thermo- | CcaCas13b | gatgctttgtttcaggtgt | gatgctttgtt | GTTGGAACTGCT | Thermo- | 6b |
| | nuclease | | atcaaccaataGT | tcaggtgtat | CTCATTTTGGAGG | nuclease | |
| | validation | | TGGAACTGCTCTCATTTTG | caaccaata | GTAATCACAAC | | |
| | CcaCas13 | | GAGGGTAATCACAAC | | | | |
| | b 22 | | | | | | |
| 6b | Thermo- | CcaCas13b | aggatgctttgtttcaggt | aggatgcttt | GTTGGAACTGCT | Thermo- | 6b |
| | nuclease | | gtatcaaccaaG | gtttcaggtg | CTCATTTTGGAGG | nuclease | |
| | validation | | TTGGAACTGCTCTCATTTTG | tatcaaccaa | GTAATCACAAC | | |
| | CcaCas13 | | GAGGGTAATCACAAC | | | | |
| | b 23 | | | | | | |
| 6b | Thermo- | CcaCas13b | ttaggatgctttgtttcag | ttaggatgctt | GTTGGAACTGCT | Thermo- | 6b |
| | nuclease | | gtgtatcaaccGT | tgtttcaggt | CTCATTTTGGAGG | nuclease | |
| | validation | | TGGAACTGCTCTCATTTTG | gtatcaacc | GTAATCACAAC | | |
| | CcaCas13 | | GAGGGTAATCACAAC | | | | |
| | b 24 | | | | | | |
| 6b | Thermo- | CcaCas13b | ttttaggatgctttgtttc | ttttaggatgc | GTTGGAACTGCT | Thermo- | 6b |
| | nuclease | | aggtgtatcaaGT | tttgtttcagg | CTCATTTTGGAGG | nuclease | |
| | validation | | TGGAACTGCTCTCATTTTG | tgtatcaa | GTAATCACAAC | | |
| | CcaCas13 | | GAGGGTAATCACAAC | | | | |
| | b 25 | | | | | | |
| 6b | Thermo- | CcaCas13b | ttttttaggatgctttgtt | ttttttaggat | GTTGGAACTGCT | Thermo- | 6b |
| | nuclease | | tcaggtgtatcGTT | gctttgtttca | CTCATTTTGGAGG | nuclease | |
| | validation | | GGAACTGCTCTCATTTTGG | ggtgtatc | GTAATCACAAC | | |
| | CcaCas13 | | AGGGTAATCACAAC | | | | |
| | b 26 | | | | | | |
| 6b | Thermo- | CcaCas13b | ccttttttaggatgctttg | ccttttttagg | GTTGGAACTGCT | Thermo- | 6b |
| | nuclease | | tttcaggtgtaGTT | atgctttgttt | CTCATTTTGGAGG | nuclease | |
| | validation | | GGAACTGCTCTCATTTTGG | caggtgta | GTAATCACAAC | | |
| | CcaCas13 | | AGGGTAATCACAAC | | | | |
| | b 27 | | | | | | |
| 6b | Thermo- | CcaCas13b | caccttttttaggatgctt | cacctttttta | GTTGGAACTGCT | Thermo- | 6b |
| | nuclease | | tgtttcaggtgGT | ggatgctttg | CTCATTTTGGAGG | nuclease | |
| | validation | | TGGAACTGCTCTCATTTTG | tttcaggtg | GTAATCACAAC | | |
| | CcaCas13 | | GAGGGTAATCACAAC | | | | |
| | b 28 | | | | | | |
| 6b | Thermo- | CcaCas13b | tacaccttttttaggatgc | tacacctttttt | GTTGGAACTGCT | Thermo- | 6b |
| | nuclease | | tttgtttcaggGT | aggatgcttt | CTCATTTTGGAGG | nuclease | |
| | validation | | TGGAACTGCTCTCATTTTG | gtttcagg | GTAATCACAAC | | |
| | CcaCas13 | | GAGGGTAATCACAAC | | | | |
| | b 29 | | | | | | |
| 6b | Thermo- | CcaCas13b | tctacaccttttttaggat | tctacaccttt | GTTGGAACTGCT | Thermo- | 6b |
| | nuclease | | gctttgtttcaGTT | tttaggatgct | CTCATTTTGGAGG | nuclease | |
| | validation | | GGAACTGCTCTCATTTTGG | ttgtttca | GTAATCACAAC | | |
| | CcaCas13 | | AGGGTAATCACAAC | | | | |
| | b 30 | | | | | | |
| 6b | Thermo- | CcaCas13b | tctctacaccttttttagg | tctctacacct | GTTGGAACTGCT | Thermo- | 6b |
| | nuclease | | atgctttgtttGTT | tttttaggatg | CTCATTTTGGAGG | nuclease | |
| | validation | | GGAACTGCTCTCATTTTGG | ctttgttt | GTAATCACAAC | | |
| | CcaCas13 | | AGGGTAATCACAAC | | | | |
| | b 31 | | | | | | |
| 6b | Thermo- | CcaCas13b | tttctctacacctttttta | tttctctacac | GTTGGAACTGCT | Thermo- | 6b |
| | nuclease | | ggatgctttgtGTT | cttttttagga | CTCATTTTGGAGG | nuclease | |
| | validation | | GGAACTGCTCTCATTTTGG | tgctttgt | GTAATCACAAC | | |
| | CcaCas13 | | AGGGTAATCACAAC | | | | |
| | b 32 | | | | | | |
| 6b | Thermo- | CcaCas13b | tatttctctacaccttttt | tatttctctac | GTTGGAACTGCT | Thermo- | 6b |
| | nuclease | | taggatgctttGTT | accttttttag | CTCATTTTGGAGG | nuclease | |
| | validation | | GGAACTGCTCTCATTTTGG | gatgcttt | GTAATCACAAC | | |
| | CcaCas13 | | AGGGTAATCACAAC | | | | |
| | b 33 | | | | | | |
| 6b | Thermo- | CcaCas13b | catatttctctacaccttt | catatttctct | GTTGGAACTGCT | Thermo- | 6b |
| | nuclease | | tttaggatgctGTT | acacctttttt | CTCATTTTGGAGG | nuclease | |
| | validation | | GGAACTGCTCTCATTTTGG | aggatgct | GTAATCACAAC | | |
| | CcaCas13 | | AGGGTAATCACAAC | | | | |
| | b 34 | | | | | | |
| 6b | Thermo- | CcaCas13b | accatatttctctacacct | accatatttct | GTTGGAACTGCT | Thermo- | 6b |
| | nuclease | | tttttaggatgGT | ctacacctttt | CTCATTTTGGAGG | nuclease | |
| | validation | | TGGAACTGCTCTCATTTTG | ttaggatg | GTAATCACAAC | | |
| | CcaCas13 | | GAGGGTAATCACAAC | | | | |
| | b 35 | | | | | | |
| 6b | Thermo- | CcaCas13b | ggaccatatttctctacac | ggaccatatt | GTTGGAACTGCT | Thermo- | 6b |
| | nuclease | | cttttttaggaGT | tctctacacct | CTCATTTTGGAGG | nuclease | |
| | validation | | TGGAACTGCTCTCATTTTG | tttttagga | GTAATCACAAC | | |
| | CcaCas13 | | GAGGGTAATCACAAC | | | | |
| | b 36 | | | | | | |
| 6b | Thermo- | CcaCas13b | caggaccatatttctctac | caggaccat | GTTGGAACTGCT | Thermo- | 6b |
| | nuclease | | accttttttagGT | atttctctaca | CTCATTTTGGAGG | nuclease | |
| | validation | | TGGAACTGCTCTCATTTTG | ccttttttag | GTAATCACAAC | | |
| | CcaCas13 | | GAGGGTAATCACAAC | | | | |
| | b 37 | | | | | | |
| 6b | Thermo- | CcaCas13b | ttcaggaccatatttctct | ttcaggacca | GTTGGAACTGCT | Thermo- | 6b |
| | nuclease | | acaccttttttGTT | tatttctctac | CTCATTTTGGAGG | nuclease | |
| | validation | | GGAACTGCTCTCATTTTGG | acctttttt | GTAATCACAAC | | |
| | CcaCas13 | | AGGGTAATCACAAC | | | | |
| | b 38 | | | | | | |
| 6b | Thermo- | CcaCas13b | gcttcaggaccatatttct | gcttcagga | GTTGGAACTGCT | Thermo- | 6b |
| | nuclease | | ctacaccttttGT | ccatatttctc | CTCATTTTGGAGG | nuclease | |
| | validation | | TGGAACTGCTCTCATTTTG | tacacctttt | GTAATCACAAC | | |
| | CcaCas13 | | GAGGGTAATCACAAC | | | | |
| | b 39 | | | | | | |
| 6b | Thermo- | CcaCas13b | ttgcttcaggaccatattt | ttgcttcagg | GTTGGAACTGCT | Thermo- | 6b |
| | nuclease | | ctctacaccttGT | accatatttct | CTCATTTTGGAGG | nuclease | |
| | validation | | TGGAACTGCTCTCATTTTG | ctacacctt | GTAATCACAAC | | |
| | CcaCas13 | | GAGGGTAATCACAAC | | | | |
| | b 40 | | | | | | |
| 6b | Thermo- | CcaCas13b | acttgcttcaggaccatat | acttgcttca | GTTGGAACTGCT | Thermo- | 6b |
| | nuclease | | ttctctacaccGT | ggaccatatt | CTCATTTTGGAGG | nuclease | |
| | validation | | TGGAACTGCTCTCATTTTG | tctctacacc | GTAATCACAAC | | |
| | CcaCas13 | | GAGGGTAATCACAAC | | | | |
| | b 41 | | | | | | |
| 6b | Thermo- | CcaCas13b | gcacttgcttcaggaccat | gcacttgctt | GTTGGAACTGCT | Thermo- | 6b |
| | nuclease | | atttctctacaGT | caggaccat | CTCATTTTGGAGG | nuclease | |
| | validation | | TGGAACTGCTCTCATTTTG | atttctctaca | GTAATCACAAC | | |
| | CcaCas13 | | GAGGGTAATCACAAC | | | | |
| | b 42 | | | | | | |
| 6b | Thermo- | CcaCas13b | atgcacttgcttcaggacc | atgcacttgc | GTTGGAACTGCT | Thermo- | 6b |
| | nuclease | | atatttctctaGT | ttcaggacca | CTCATTTTGGAGG | nuclease | |
| | validation | | TGGAACTGCTCTCATTTTG | tatttctcta | GTAATCACAAC | | |
| | CcaCas13 | | GAGGGTAATCACAAC | | | | |
| | b 43 | | | | | | |
| 6b | Thermo- | CcaCas13b | aaatgcacttgcttcagga | aaatgcactt | GTTGGAACTGCT | Thermo- | 6b |
| | nuclease | | ccatatttctcGT | gcttcagga | CTCATTTTGGAGG | nuclease | |
| | validation | | TGGAACTGCTCTCATTTTG | ccatatttctc | GTAATCACAAC | | |
| | CcaCas13 | | GAGGGTAATCACAAC | | | | |
| | b 44 | | | | | | |
| 6b | Thermo- | CcaCas13b | gtaaatgcacttgcttcag | gtaaatgcac | GTTGGAACTGCT | Thermo- | 6b |
| | nuclease | | gaccatatttcG | ttgcttcagg | CTCATTTTGGAGG | nuclease | |
| | validation | | TTGGAACTGCTCTCATTTTG | accatatttc | GTAATCACAAC | | |
| | CcaCas13 | | GAGGGTAATCACAAC | | | | |
| | b 45 | | | | | | |
| 6b | Thermo- | CcaCas13b | tcaattttctttgcatttt | tcaattttcttt | GTTGGAACTGCT | Thermo- | 6b |
| | nuclease | | ctaccatctttGTTG | gcattttctac | CTCATTTTGGAGG | nuclease | |
| | validation | | GAACTGCTCTCATTTTGGA | catcttt | GTAATCACAAC | | |
| | CcaCas13 | | GGGTAATCACAAC | | | | |
| | b 46 | | | | | | |
| 6b | Thermo- | CcaCas13b | ttcaattttctttgcattt | ttcaattttctt | GTTGGAACTGCT | Thermo- | 6b |
| | nuclease | | tctaccatcttGTTG | tgcattttcta | CTCATTTTGGAGG | nuclease | |
| | validation | | GAACTGCTCTCATTTTGGA | ccatctt | GTAATCACAAC | | |
| | CcaCas13 | | GGGTAATCACAAC | | | | |
| | b 47 | | | | | | |
| 6b | Thermo- | CcaCas13b | cttcaattttctttgcatt | cttcaattttct | GTTGGAACTGCT | Thermo- | 6b |
| | nuclease | | ttctaccatctGTT | ttgcattttcta | CTCATTTTGGAGG | nuclease | |
| | validation | | GGAACTGCTCTCATTTTGG | ccatct | GTAATCACAAC | | |
| | CcaCas13 | | AGGGTAATCACAAC | | | | |
| | b 48 | | | | | | |
| 6c | thermo- | LwaCas13a | GATTTAGACTACCCCAAAA | TATCAA | GATTTAGACTAC | thermo- | 6a |
| | nulease | | ACGAAGGGGACTAAAACT | CCAATA | CCCAAAAACGAA | nuclease | |
| | validation | | ATCAACCAATAATAGTCTG | ATAGTC | GGGGACTAAAAC | | |
| | LwaCas13 | | AATGTCAT | TGAATG | | | |
| | a 1 (top | | | TCAT | | | |
| | predicted) | | | | | | |
| 6c | thermo- | LwaCas13a | GATTTAGACTACCCCAAAA | TTGCTT | GATTTAGACTAC | thermo- | 6a |
| | nulease | | ACGAAGGGGACTAAAACTT | CAGGA | CCCAAAAACGAA | nuclease | |
| | validation | | GCTTCAGGACCATATTTCT | CCATAT | GGGGACTAAAAC | | |
| | LwaCas13 | | CTACACC | TTCTCT | | | |
| | a 20 | | | ACACC | | | |
| | (bottom | | | | | | |
| | predicted) | | | | | | |
| 6c | APML | LwaCas13a | GATTTAGACTACCCCAAAA | GCGCCA | GATTTAGACTAC | APML | 6a |
| | long | | ACGAAGGGGACTAAAACG | CTGGCC | CCCAAAAACGAA | long | |
| | validation | | CGCCACTGGCCACGTGGTT | ACGTGG | GGGGACTAAAAC | | |
| | LwaCas13 | | GCTGTTGG | TTGCTG | | | |
| | a 1 (top | | | TTGG | | | |
| | predicted) | | | | | | |
| 6c | APML | LwaCas13a | GATTTAGACTACCCCAAAA | TCCCCG | GATTTAGACTAC | APML | 6a |
| | long | | ACGAAGGGGACTAAAACT | GCGCCA | CCCAAAAACGAA | long | |
| | validation | | CCCCGGCGCCACTGGCCAC | CTGGCC | GGGGACTAAAAC | | |
| | LwaCas13 | | GTGGTTGC | ACGTGG | | | |
| | a 18 | | | TTGC | | | |
| | (bottom | | | | | | |
| | predicted) | | | | | | |
| 6c | APML | LwaCas13a | GATTTAGACTACCCCAAAA | TCTCAA | GATTTAGACTAC | APML | 6a |
| | short | | ACGAAGGGGACTAAAACT | TGGCTT | CCCAAAAACGAA | short | |
| | validation | | CTCAATGGCTTTCCCCTGG | TCCCCT | GGGGACTAAAAC | | |
| | LwaCas13 | | GTGATGCA | GGGTGA | | | |
| | a 1 (top | | | TGCA | | | |
| | predicted) | | | | | | |
| 6c | APML | LwaCas13a | GATTTAGACTACCCCAAAA | TGGGTC | GATTTAGACTAC | APML | 6a |
| | short | | ACGAAGGGGACTAAAACT | TCAATG | CCCAAAAACGAA | short | |
| | validation | | GGGTCTCAATGGCTTTCCC | GCTTTC | GGGGACTAAAAC | | |
| | LwaCas13 | | CTGGGTGA | CCCTGG | | | |
| | a23 | | | GTGA | | | |
| | (bottom | | | | | | |
| | predicted) | | | | | | |
| 6d | Thermo- | CcaCas13b | caggtgtatcaaccaataat | caggtgtatc | GTTGGAACTGCT | Thermo- | 6b |
| | nuclease | | agtctgaatgG | aaccaataat | CTCATTTTGGAGG | nuclease | |
| | validation | | TTGGAACTGCTCTCATTTTG | agtctgaatg | GTAATCACAAC | | |
| | CcaCas13 | | GAGGGTAATCACAAC | | | | |
| | b 16 (top | | | | | | |
| | predicted) | | | | | | |
| 6d | Thermo- | CcaCas13b | cttcaattttctttgcattt | cttcaattttct | GTTGGAACTGCT | Thermo- | 6b |
| | nuclease | | tctaccatctGTT | ttgcattttcta | CTCATTTTGGAGG | nuclease | |
| | validation | | GGAACTGCTCTCATTTTGG | ccatct | GTAATCACAAC | | |
| | CcaCas13 | | AGGGTAATCACAAC | | | | |
| | b 48 | | | | | | |
| | (bottom | | | | | | |
| | predicted) | | | | | | |
| 6d | APML | CcaCas13b | atggctgcctccccggcgcc | atggctgcct | GTTGGAACTGCT | APML | 6b |
| | long | | actggccacg | ccccggcgc | CTCATTTTGGAGG | long | |
| | validation | | GTTGGAACTGCTCTCATTTT | cactggcca | GTAATCACAAC | | |
| | CcaCas13 | | GGAGGGTAATCACAAC | cg | | | |
| | b 14 (top | | | | | | |
| | predicted) | | | | | | |
| 6d | APML | CcaCas13b | tggctgcctccccggcgcca | tggctgcctc | GTTGGAACTGCT | APML | 6b |
| | long | | ctggccacgt | cccggcgcc | CTCATTTTGGAGG | long | |
| | validation | | GTTGGAACTGCTCTCATTTT | actggccac | GTAATCACAAC | | |
| | CcaCas13 | | GGAGGGTAATCACAAC | gt | | | |
| | b 13 | | | | | | |
| | (bottom | | | | | | |
| | predicted) | | | | | | |
| 6d | APML | CcaCas13b | cccctgggtgatgcaagagc | cccctgggt | GTTGGAACTGCT | APML | 6b |
| | short | | tgaggtcctg | gatgcaaga | CTCATTTTGGAGG | short | |
| | validation | | GTTGGAACTGCTCTCATTTT | gctgaggtc | GTAATCACAAC | | |
| | CcaCas13 | | GGAGGGTAATCACAAC | ctg | | | |
| | b 4 (top | | | | | | |
| | predicted) | | | | | | |
| 6d | APML | CcaCas13b | ctcaatggctttcccctggg | ctcaatggct | GTTGGAACTGCT | APML | 6b |
| | short | | tgatgcaagaG | ttcccctggg | CTCATTTTGGAGG | short | |
| | validation | | TTGGAACTGCTCTCATTTTG | tgatgcaag | GTAATCACAAC | | |
| | CcaCas13 | | GAGGGTAATCACAAC | a | | | |
| | b 16 | | | | | | |
| | (bottom | | | | | | |
| | predicted) | | | | | | |
| 6e | thermo- | LwaCas13a | GATTTAGACTACCCCAAAA | TATCAA | GATTTAGACTAC | thermo- | 6a |
| | nuclease | | ACGAAGGGGACTAAAACT | CCAATA | CCCAAAAACGAA | nuclease | |
| | validation | | ATCAACCAATAATAGTCTG | ATAGTC | GGGGACTAAAAC | | |
| | LwaCas13 | | AATGTCAT | TGAATG | | | |
| | a 1 (top | | | TCAT | | | |
| | predicted) | | | | | | |
| 6e | thermo- | LwaCas13a | GATTTAGACTACCCCAAAA | TTGCTT | GATTTAGACTAC | thermo- | 6a |
| | nuclease | | ACGAAGGGGACTAAAACTT | CAGGA | CCCAAAAACGAA | nuclease | |
| | validation | | GCTTCAGGACCATATTTCT | CCATAT | GGGGACTAAAAC | | |
| | LwaCas13 | | CTACACC | TTCTCT | | | |
| | a20 | | | ACACC | | | |
| | (bottom | | | | | | |
| | predicted) | | | | | | |
| 6e | APML | LwaCas13a | GATTTAGACTACCCCAAAA | GCGCCA | GATTTAGACTAC | APML | 6a |
| | long | | ACGAAGGGGACTAAAACG | CTGGCC | CCCAAAAACGAA | long | |
| | validation | | CGCCACTGGCCACGTGGTT | ACGTGG | GGGGACTAAAAC | | |
| | LwaCas13 | | GCTGTTGG | TTGCTG | | | |
| | a 1 (top | | | TTGG | | | |
| | predicted) | | | | | | |
| 6e | APML | LwaCas13a | GATTTAGACTACCCCAAAA | TCCCCG | GATTTAGACTAC | APML | 6a |
| | long | | ACGAAGGGGACTAAAACT | GCGCCA | CCCAAAAACGAA | long | |
| | validation | | CCCCGGCGCCACTGGCCAC | CTGGCC | GGGGACTAAAAC | | |
| | LwaCas13 | | GTGGTTGC | ACGTGG | | | |
| | a 18 | | | TTGC | | | |
| | (bottom | | | | | | |
| | predicted) | | | | | | |
| 6e | APML | LwaCas13a | GATTTAGACTACCCCAAAA | TCTCAA | GATTTAGACTAC | APML | 6a |
| | short | | ACGAAGGGGACTAAAACT | TGGCTT | CCCAAAAACGAA | short | |
| | validation | | CTCAATGGCTTTCCCCTGG | TCCCCT | GGGGACTAAAAC | | |
| | LwaCas13 | | GTGATGCA | GGGTGA | | | |
| | a 1 (top | | | TGCA | | | |
| | predicted) | | | | | | |
| 6e | APML | LwaCas13a | GATTTAGACTACCCCAAAA | TGGGTC | GATTTAGACTAC | APML | 6a |
| | short | | ACGAAGGGGACTAAAACT | TCAATG | CCCAAAAACGAA | short | |
| | validation | | GGGTCTCAATGGCTTTCCC | GCTTTC | GGGGACTAAAAC | | |
| | LwaCas13 | | CTGGGTGA | CCCTGG | | | |
| | a 23 | | | GTGA | | | |
| | (bottom | | | | | | |
| | predicted) | | | | | | |
| 6f | Thermo- | CcaCas13b | caggtgtatcaaccaataat | caggtgtatc | GTTGGAACTGCT | Thermo- | 6b |
| | nuclease | | agtctgaatgG | aaccaataat | CTCATTTTGGAGG | nuclease | |
| | validation | | TTGGAACTGCTCTCATTTTG | agtctgaatg | GTAATCACAAC | | |
| | CcaCas13 | | GAGGGTAATCACAAC | | | | |
| | b 16 (top | | | | | | |
| | predicted) | | | | | | |
| 6f | Thermo- | CcaCas13b | cttcaattttctttgcattt | cttcaattttct | GTTGGAACTGCT | Thermo- | 6b |
| | nuclease | | tctaccatctGTT | ttgcattttcta | CTCATTTTGGAGG | nuclease | |
| | validation | | GGAACTGCTCTCATTTTGG | ccatct | GTAATCACAAC | | |
| | CcaCas13 | | AGGGTAATCACAAC | | | | |
| | b 48 | | | | | | |
| | (bottom | | | | | | |
| | predicted) | | | | | | |
| 6f | APML | CcaCas13b | atggctgcctccccggcgcc | atggctgcct | GTTGGAACTGCT | APML | 6b |
| | long | | actggccacg | ccccggcgc | CTCATTTTGGAGG | long | |
| | validation | | GTTGGAACTGCTCTCATTTT | cactggcca | GTAATCACAAC | | |
| | CcaCas13 | | GGAGGGTAATCACAAC | cg | | | |
| | b 14 (top | | | | | | |
| | predicted) | | | | | | |
| 6f | APML | CcaCas13b | tggctgcctccccggcgcca | tggctgcctc | GTTGGAACTGCT | APML | 6b |
| | long | | ctggccacgt | cccggcgcc | CTCATTTTGGAGG | long | |
| | validation | | GTTGGAACTGCTCTCATTTT | actggccac | GTAATCACAAC | | |
| | CcaCas13 | | GGAGGGTAATCACAAC | gt | | | |
| | b 13 | | | | | | |
| | (bottom | | | | | | |
| | predicted) | | | | | | |
| 6f | APML | CcaCas13b | cccctgggtgatgcaagagc | cccctgggt | GTTGGAACTGCT | APML | 6b |
| | short | | tgaggtcctg | gatgcaaga | CTCATTTTGGAGG | short | |
| | validation | | GTTGGAACTGCTCTCATTTT | gctgaggtc | GTAATCACAAC | | |
| | CcaCas13 | | GGAGGGTAATCACAAC | ctg | | | |
| | b 4 (top | | | | | | |
| | predicted) | | | | | | |
| 6f | APML | CcaCas13b | ctcaatggctttcccctggg | ctcaatggct | GTTGGAACTGCT | APML | 6b |
| | short | | tgatgcaagaG | ttcccctggg | CTCATTTTGGAGG | short | |
| | validation | | TTGGAACTGCTCTCATTTTG | tgatgcaag | GTAATCACAAC | | |
| | CcaCas13 | | GAGGGTAATCACAAC | a | | | |
| | b 16 | | | | | | |
| | (bottom | | | | | | |
| | predicted) | | | | | | |
| 7b | Acyltrans- | LwaCas13a | GATTTAGACTACCCCAAAA | GCACGC | GATTTAGACTAC | Acyl- | 7b |
| | ferase | | ACGAAGGGGACTAAAACgc | TGGAGG | CCCAAAAACGAA | trans- | |
| | LwaCas13 | | acgctggaggggtcgagcac | GGTCGA | GGGGACTAAAAC | ferase | |
| | atop | | gctcac | GCACGC | | | |
| | predicted | | | TCAC | | | |
| | crRNA | | | | | | |
| 7c | Acyltrans- | LwaCas13a | GATTTAGACTACCCCAAAA | CATCGC | GATTTAGACTAC | Acyl- | 7c |
| | ferase | | ACGAAGGGGACTAAAACcat | AGAGC | CCCAAAAACGAA | trans- | |
| | LwaCas13 | | cgcagagcacgctggagggg | ACGCTG | GGGGACTAAAAC | ferase | |
| | a bottom | | tcgag | GAGGG | | | |
| | predicted | | | GTCGAG | | | |
| | crRNA | | | | | | |
| 7d- | Acyltrans- | LwaCas13a | GATTTAGACTACCCCAAAA | GCACGC | GATTTAGACTAC | Acyl- | 7b |
| f | ferase | | ACGAAGGGGACTAAAACgc | TGGAGG | CCCAAAAACGAA | trans- | |
| | LwaCas13 | | acgctggaggggtcgagca | GGTCGA | GGGGACTAAAAC | ferase | |
| | a top | | cgctcac | GCACGC | | | |
| | predicted | | | TCAC | | | |
| | crRNA | | | | | | |
| 7d- | Acyltrans- | LwaCas13a | GATTTAGACTACCCCAAAA | CATCGC | GATTTAGACTAC | Acyl- | 7c |
| f | ferase | | ACGAAGGGGACTAAAACcat | AGAGC | CCCAAAAACGAA | trans- | |
| | LwaCas13 | | cgcagagcacgctggagggg | ACGCTG | GGGGACTAAAAC | ferase | |
| | a bottom | | tcgag | GAGGG | | | |
| | predicted | | | GTCGAG | | | |
| | crRNA | | | | | | |
| 7h | Thermo- | CcaCas13b | caggtgtatcaaccaataat | caggtgtatc | GTTGGAACTGCT | Thermo- | 6b |
| | nuclease | | agtctgaatgG | aaccaataat | CTCATTTTGGAGG | nuclease | |
| | validation | | TTGGAACTGCTCTCATTTTG | agtctgaatg | GTAATCACAAC | | |
| | CcaCas13 | | GAGGGTAATCACAAC | | | | |
| | b 16 (top | | | | | | |
| | predicted) | | | | | | |
| 7i | Thermo- | CcaCas13b | cttcaattttctttgcattt | cttcaattttct | GTTGGAACTGCT | Thermo- | 6b |
| | nuclease | | tctaccatctGTT | ttgcattttcta | CTCATTTTGGAGG | nuclease | |
| | validation | | GGAACTGCTCTCATTTTGG | ccatct | GTAATCACAAC | | |
| | CcaCas13 | | AGGGTAATCACAAC | | | | |
| | b 48 | | | | | | |
| | (bottom | | | | | | |
| | predicted) | | | | | | |
| 7j- | Thermo- | CcaCas13b | caggtgtatcaaccaataat | caggtgtatc | GTTGGAACTGCT | Thermo- | 6b |
| l | nuclease | | agtctgaatgG | aaccaataat | CTCATTTTGGAGG | nuclease | |
| | validation | | TTGGAACTGCTCTCATTTTG | agtctgaatg | GTAATCACAAC | | |
| | CcaCas13 | | GAGGGTAATCACAAC | | | | |
| | b 16 (top | | | | | | |
| | predicted) | | | | | | |
| 7j- | Thermo- | CcaCas13b | cttcaattttctttgcattt | cttcaattttct | GTTGGAACTGCT | Thermo- | 6b |
| l | nuclease | | tctaccatctGTT | ttgcattttcta | CTCATTTTGGAGG | nuclease | |
| | validation | | GGAACTGCTCTCATTTTGG | ccatct | GTAATCACAAC | | |
| | CcaCas13 | | AGGGTAATCACAAC | | | | |
| | b 48 | | | | | | |
| | (bottom | | | | | | |
| | predicted) | | | | | | |
| 8b | Ea175 | LwaCas13a | GATTTAGACTACCCCAAAA | AAGATG | GATTTAGACTAC | Ea175 | 8b |
| | LwaCas13 | | ACGAAGGGGACTAAAACA | TGGATT | CCCAAAAACGAA | | |
| | a top | | AGATGTGGATTTTTACATA | TTTACA | GGGGACTAAAAC | | |
| | predicted | | GTAAAAAT | TAGTAA | | | |
| | | | | AAAT | | | |
| 8b | Thermo- | CcaCas13b | caggtgtatcaaccaataat | caggtgtatc | GTTGGAACTGCT | Thermo- | 6b |
| | nuclease | | agtctgaatgG | aaccaataat | CTCATTTTGGAGG | nuclease | |
| | validation | | TTGGAACTGCTCTCATTTTG | agtctgaatg | GTAATCACAAC | | |
| | CcaCas13 | | GAGGGTAATCACAAC | | | | |
| | b 16 (top | | | | | | |
| | predicted) | | | | | | |
| 8d-e | Ea175 | LwaCas13a | GATTTAGACTACCCCAAAA | AAGATG | GATTTAGACTAC | Ea175 | 8b |
| | LwaCas13 | | ACGAAGGGGACTAAAACA | TGGATT | CCCAAAAACGAA | | |
| | a top | | AGATGTGGATTTTTACATA | TTTACA | GGGGACTAAAAC | | |
| | predicted | | GTAAAAAT | TAGTAA | | | |
| | | | | AAAT | | | |
| 8d-e | Thermo- | CcaCas13b | caggtgtatcaaccaataat | caggtgtatc | GTTGGAACTGCT | Thermo- | 6b |
| | nuclease | | agtctgaatgG | aaccaataat | CTCATTTTGGAGG | nuclease | |
| | validation | | TTGGAACTGCTCTCATTTTG | agtctgaatg | GTAATCACAAC | | |
| | CcaCas13 | | GAGGGTAATCACAAC | | | | |
| | b 16 (top | | | | | | |
| | predicted) | | | | | | |
| 12a- | Ea175 | LwaCas13a | GATTTAGACTACCCCAAAA | AAGATG | GATTTAGACTAC | Ea175 | 8b |
| c | LwaCas13 | | ACGAAGGGGACTAAAACA | TGGATT | CCCAAAAACGAA | | |
| | a top | | AGATGTGGATTTTTACATA | TTTACA | GGGGACTAAAAC | | |
| | predicted | | GTAAAAAT | TAGTAA | | | |
| | | | | AAAT | | | |
| 12d- | Ea81 | LwaCas13a | GATTTAGACTACCCCAAAA | ATTTCT | GATTTAGACTAC | Ea81 | 12d |
| f | LwaCas13 | | ACGAAGGGGACTAAAACA | AGAATT | CCCAAAAACGAA | | |
| | a top | | TTTCTAGAATTGAAGGAAT | GAAGG | GGGGACTAAAAC | | |
| | predicted | | TAAACCAA | AATTAA | | | |
| | | | | ACCAA | | | |
| 10d- | Ea175 | LwaCas13a | GATTTAGACTACCCCAAAA | AAGATG | GATTTAGACTAC | Ea175 | 8b |
| e | LwaCas13 | | ACGAAGGGGACTAAAACA | TGGATT | CCCAAAAACGAA | | |
| | a top | | AGATGTGGATTTTTACATA | TTTACA | GGGGACTAAAAC | | |
| | predicted | | GTAAAAAT | TAGTAA | | | |
| | | | | AAAT | | | |
| 1b-c | Lectin | LwaCas13a | GATTTAGACTACCCCAAAA | ggggtggag | GATTTAGACTAC | Lectin | 1b |
| | LwaCas13 | | ACGAAGGGGACTAAAACgg | tagagggcg | CCCAAAAACGAA | | |
| | a crRNA | | ggtggagtagagggcgcga | cgaccaaga | GGGGACTAAAAC | | |
| | | | ccaagag | g | | | |
| 1b-c | ssDN1 | CcaCas13b | acgccaagcttgcatgcct | acgccaagc | GTTGGAACTGCT | ssDNA 1 | 1b |
| | CcaCas13 | | gcaggtcgagt | ttgcatgcct | CTCATTTTGGAGG | | |
| | b crRNA | | GTTGGAACTGCTCTCATTTT | gcaggtcga | GTAATCACAAC | | |
| | | | GGAGGGTAATCACAAC | gt | | | |
| 1e-f | Zika | LwaCas13a | GATTTAGACTACCCCAAAA | actccctaga | GATTTAGACTAC | Zika | 1e |
| | LwaCas13 | | ACGAAGGGGACTAAAACact | accacgaca | CCCAAAAACGAA | | |
| | a crRNA | | ccctagaaccacgacagttt | gtttgcctt | GGGGACTAAAAC | | |
| | | | gcctt | | | | |
| 1e-f | Dengue | CcaCas13b | tttgcttctgtccagtgag | tttgcttctgt | GTTGGAACTGCT | Dengue | 1e |
| | CcaCas13 | | catggtcttcgGT | ccagtgagc | CTCATTTTGGAGG | | |
| | b crRNA | | TGGAACTGCTCTCATTTTG | atggtcttcg | GTAATCACAAC | | |
| | | | GAGGGTAATCACAAC | | | | |
| 1e-f | ssDNA 1 | AsCas12a | TAATTTCTACTCTTGTAGAT | ctgtgtttatc | TAATTTCTACTCT | ssDNA1 | 1e |
| | AsCas12a | | ctgtgtttatccgctcacaa | cgctcacaa | TGTAGAT | | |
| | crRNA | | | | | | |

TABLE 2
Target sequences used in this study

| | | | DNA/ |
|---|---|---|---|
| FIG. | Name | Target sequence | RNA |
| 11b | Ebola | attcgcagtgaagagttgtctttcacagttgtatcaaacggagccaaaaacatcagt | RNA |
| | (SEQ ID No: 3279) | ggtcagagtccggcgcgaacttcttccgacccagggaccaacacaacaactgaagac | |
| | | cacaaaatcatggcttcagaaaattcctctgcaatggttcaagtgcacagtcaa | |
| 11b | Zika | gacaccggaactccacactggaacaacaaagaagcactggtagagttcaaggacgca | RNA |
| | (SEQ ID No: 3280) | catgccaaaaggcaaactgtcgtggttctagggagtcaagaaggagcagttcacacg | |
| | | gcccttgctggagctctggaggctgagatggatggtgcaaagggaaggctgtcctct | |
| | | ggc | |
| 6a-f | Thermonuclease | agcgattgatggtgatactgttaaattaatgtacaaaggtcaaccaatgacattcag | RNA |
| | (SEQ ID No: 3281) | actattattggttgatacacctgaaacaaagcatcctaaaaaaggtgtagagaaata | |
| | | tggtcctgaagcaagtgcatttacgaaaaagatggtagaaaatgcaaagaaaattga | |
| | | ag | |
| 6a-f | APML long | cacctggatggaccgcctagccccaggagccccgtcataggaagtgaggtcttcctg | RNA |
| | (SEQ ID No: 3282) | cccaacagcaaccacgtggccagtggcgccggggaggcagccattgagacccagagc | |
| | | agcagttctgaagagatagtgcccagccctccctcgccaccccctctaccccgcatc | |
| | | taca | |
| 6a-f | APML short | ggaggagccccagagcctgcaagctgccgtgcgcaccgatggcttcgacgagttcaa | RNA |
| | (SEQ ID No: 3283) | ggtgcgcctgcaggacctcagctcttgcatcacccaggggaaagccattgagaccca | |
| | | gagcagcagttctgaagagatagtgcccagccctccctcgccaccccctctaccccg | |
| | | catc | |
| 7b-f | Acyltransferase | gtcgggcgcgcacgttttcccttcgctgagcacgctgcgcgcgtcgcctacgtgaat | DNA |
| | (SEQ ID No: 3284) | gcgctgttcgatgcgttggccgaaggcaacccgcgggtgagcgtgctcgacccctcc | |
| | | agcgtgctctgcgatggcctggattgtttcgccgaacgtgatggctggtcgctgtac | |
| | | atgg | |
| 7h-l | Thermonuclease | agcgattgatggtgatactgttaaattaatgtacaaaggtcaaccaatgacattcag | DNA |
| | (SEQ ID No: 3285) | actattattggttgatacacctgaaacaaagcatcctaaaaaaggtgtagagaaata | |
| | | tggtcctgaagcaagtgcatttacgaaaaagatggtagaaaatgcaaagaaaattga | |
| | | ag | |
| 8b | Thermonuclease | agcgattgatggtgatactgttaaattaatgtacaaaggtcaaccaatgacattcag | DNA |
| | (SEQ ID No: 3286) | actattattggttgatacacctgaaacaaagcatcctaaaaaaggtgtagagaaata | |
| | | tggtcctgaagcaagtgcatttacgaaaaagatggtagaaaatgcaaagaaaattga | |
| | | ag | |
| 8b | Ea175 | GGCCAGTTTGAATAAGACAATGAATTATTTTTACTATGTAAAAATCCACATCTTTCA | DNA |
| | (SEQ ID No: 3287) | CATTTCCATTCTTGTGTTTCA | |
| 8d-e | Thermonuclease | agcgattgatggtgatactgttaaattaatgtacaaaggtcaaccaatgacattcag | DNA |
| | (SEQ ID No: 3288) | actattattggttgatacacctgaaacaaagcatcctaaaaaaggtgtagagaaata | |
| | | tggtcctgaagcaagtgcatttacgaaaaagatggtagaaaatgcaaagaaaattga | |
| | | ag | |
| 8d-e | Ea175 | GGCCAGTTTGAATAAGACAATGAATTATTTTTACTATGTAAAAATCCACATCTTTCA | DNA |
| | (SEQ ID No: 3289) | CATTTCCATTCTTGTGTTTCA | |
| 9a | ssRNA 1 | GGCCAGTGAATTCGAGCTCGGTACCCGGGGATCCTCTAGAAATATGGATTACTTGgt | RNA |
| | (SEQ ID No: 3290) | AGAACAGCAATCTACTCGACCTGCAGGCATGCAAGCTTGGCGTAATCATGGTCATAG | |
| | | CTGTTTCCTGTGTTTATCCGCTCACAATTCCACACAACATACGAGCCGGAAGCATAA | |
| | | AG | |
| 9a | Thermonuclease | agcgattgatggtgatactgttaaattaatgtacaaaggtcaaccaatgacattcag | RNA |
| | (SEQ ID No: 3291) | actattattggttgatacacctgaaacaaagcatcctaaaaaaggtgtagagaaata | |
| | | tggtcctgaagcaagtgcatttacgaaaaagatggtagaaaatgcaaagaaaattga | |
| | | ag | |
| 9a | Dengue | agtacatattcaggggccaacctctcaacaatgacgaagaccatgctcactggacag | RNA |
| | (SEQ ID No: 3292) | aagcaaaaatgctgctggacaacatcaacacaccagaagggattataccagctctct | |
| | | ttgaaccagaaagggagaagtcagccgccatagacggtgaataccgcctgaagggt | |
| 12a-c | Ea175 | GGCCAGTTTGAATAAGACAATGAATTATTTTTACTATGTAAAAATCCACATCTTTCA | DNA |
| | (SEQ ID No: 3293) | CATTTCCATTCTTGTGTTTCA | |
| 12d-f | Ea81 | ATTGTTACATTGTACACATACATAAGCAACATAAGCATCATTTGGTTTAATTCCTTC | DNA |
| | (SEQ ID No: 3294) | AATTCTAGAAATATTTGTTTGATTTTTTACTTCACGCCTACTCAT | |
| 10d-f | Ea175 | GGCCAGTTTGAATAAGACAATGAATTATTTTTACTATGTAAAAATCCACATCTTTCA | DNA |
| | (SEQ ID No: 3295) | CATTTCCATTCTTGTGTTTCA | |
| 1b-c | Lectin | aagttacaactcaataaggttgacgaaaacggcaccccaaaaccctcgtctcttggt | DNA |
| | (SEQ ID No: 3296) | cgcgccctctactccacccccatccacatttgggacaaagaaaccggtagcgttgcc | |
| | | agcttcgccgcttccttcaacttcaccttctatgcccctgacacaaaaaggcttgca | |
| | | gatgggcttgccttctttctcgc | |
| 1b-c | ssDNA 1 | GGCCAGTGAATTCGAGCTCGGTACCCGGGGATCCTCTAGAAATATGGATTACTTGgt | DNA |
| | (SEQ ID No: 3297) | AGAACAGCAATCTACTCGACCTGCAGGCATGCAAGCTTGGCGTAATCATGGTCATAG | |
| | | CTGTTTCCTGTGTTTATCCGCTCACAATTCCACACAACATACGAGCCGGAAGCATAA | |
| | | AG | |
| 1e-f | Zika | gacaccggaactccacactggaacaacaaagaagcactggtagagttcaaggacgca | RNA |
| | (SEQ ID No: 3298) | catgccaaaaggcaaactgtcgtggttctagggagtcaagaaggagcagttcacacg | |
| | | gcccttgctggagctctggaggctgagatggatggtgcaaagggaaggctgtcctct | |
| | | ggc | |
| 1e-f | Dengue | agtacatattcaggggccaacctctcaacaatgacgaagaccatgctcactggacag | RNA |
| | (SEQ ID No: 3299) | aagcaaaaatgctgctggacaacatcaacacaccagaagggattataccagctctct | |
| | | ttgaaccagaaagggagaagtcagccgccatagacggtgaataccgcctgaagggt | |
| 1e-f | ssDNA 1 | GGCCAGTGAATTCGAGCTCGGTACCCGGGGATCCTCTAGAAATATGGATTACTTGgt | DNA |
| | (SEQ ID No: 3300) | AGAACAGCAATCTACTCGACCTGCAGGCATGCAAGCTTGGCGTAATCATGGTCATAG | |
| | | CTGTTTCCTGTGTTTATCCGCTCACAATTCCACACAACATACGAGCCGGAAGCATAA | |
| | | AG | |

TABLE 3
RPA primers used in this study (SEQ ID Nos: 3301-3342)

| FIG. | Name | Sequence | Target |
|---|---|---|---|
| 7b | RPA Acyltransferase F | gaaatTAATACGACTCACTATAGGGCTACGTGAA | acyltransferase |
| | with T7 | TGCGCTGTTCGATG | |
| 7b | RPA Acyltransferase R | CATCACGTTCGGCGAAACAATCCAG | acyltransferase |
| 7c | RPA Acyltransferase F | gaaatTAATACGACTCACTATAGGGCTACGTGAA | acyltransferase |
| | with T7 | TGCGCTGTTCGATG | |
| 7c | RPA Acyltransferase R | CATCACGTTCGGCGAAACAATCCAG | acyltransferase |
| 7e | RPA Acyltransferase F | gaaatTAATACGACTCACTATAGGGCTACGTGAA | acyltransferase |
| | with T7 | TGCGCTGTTCGATG | |
| 7e | RPA Acyltransferase R | CATCACGTTCGGCGAAACAATCCAG | acyltransferase |
| 7h | RPA Thermonuclease F | gaaatTAATACGACTCACTATAGGGTGTACAAAG | thermonuclease |
| | with T7 | GTCAACCAATGACATTCAG | |
| 7h | RPA Thermonuclease R | TGCACTTGCTTCAGGACCATATTTC | thermonuclease |
| 7i | RPA Thermonuclease F | gaaatTAATACGACTCACTATAGGGTGTACAAAG | thermonuclease |
| | with T7 | GTCAACCAATGACATTCAG | |
| 7i | RPA Thermonuclease R | TGCACTTGCTTCAGGACCATATTTC | thermonuclease |
| 7k | RPA Thermonuclease F | gaaatTAATACGACTCACTATAGGGTGTACAAAG | thermonuclease |
| | with T7 | GTCAACCAATGACATTCAG | |
| 7k | RPA Thermonuclease R | TGCACTTGCTTCAGGACCATATTTC | thermonuclease |
| 8b | Multiplexing RPA | gaaatTAATACGACTCACTATAGGGAGCGATTGA | thermonuclease |
| | Thermonuclease F | TGGTGATACTGTTAAA | |
| | with T7 | | |
| 8b | Multiplexing RPA | TCGTAAATGCACTTGCTTCAGGACC | thermonuclease |
| | Thermonuclease R | | |
| 8b | RPA Ea175 F with T7 | gaaattaatacgactcactatagggGGCCAGTTT | Ea175 |
| | | GAATAAGACAATG | |
| 8b | RPA Ea175 R | GGCCAGTTTGAATAAGACAATG | Ea175 |
| 8d | Multiplexing RPA | gaaatTAATACGACTCACTATAGGGAGCGATTGA | thermonuclease |
| | Thermonuclease F | TGGTGATACTGTTAAA | |
| | with T7 | | |
| 8d | Multiplexing RPA | TCGTAAATGCACTTGCTTCAGGACC | thermonuclease |
| | Thermonuclease R | | |
| 8d | RPA Ea175 F with T7 | gaaattaatacgactcactatagggGGCCAGTTT | Ea175 |
| | | GAATAAGACAATG | |
| 8d | RPA Ea175 R | GGCCAGTTTGAATAAGACAATG | Ea175 |
| 8d | Multiplexing RPA | gaaatTAATACGACTCACTATAGGGAGCGATTGA | thermonuclease |
| | Thermonuclease F | TGGTGATACTGTTAAA | |
| | with T7 | | |
| 8d | Multiplexing RPA | TCGTAAATGCACTTGCTTCAGGACC | thermonuclease |
| | Thermonuclease R | | |
| 8d | RPA Ea175 F with T7 | gaaattaatacgactcactatagggGGCCAGTTT | Ea175 |
| | | GAATAAGACAATG | |
| 8d | RPA Ea175 R | GGCCAGTTTGAATAAGACAATG | Ea175 |
| 12a | RPA Ea175 F with T7 | gaaattaatacgactcactatagggGGCCAGTTT | Ea175 |
| | | GAATAAGACAATG | |
| 12a | RPA Ea175 R | GGCCAGTTTGAATAAGACAATG | Ea175 |
| 12c | RPA Ea175 F with T7 | gaaattaatacgactcactatagggGGCCAGTTT | Ea175 |
| | | GAATAAGACAATG | |
| 12c | RPA Ea175 R | GGCCAGTTTGAATAAGACAATG | Ea175 |
| 12d | RPA Ea81 F with T7 | gaaattaatacgactcactatagggATTGTTACA | Ea81 |
| | | TTGTACACATACA | |
| 12d | RPA Ea81 R | ATTGTTACATTGTACACATACA | Ea81 |
| 12f | RPA Ea81 F with T7 | gaaattaatacgactcactatagggATTGTTACA | Ea81 |
| | | TTGTACACATACA | |
| 12f | RPA Ea81 R | ATTGTTACATTGTACACATACA | Ea81 |
| 10e | RPA Ea175 F with T7 | gaaattaatacgactcactatagggGGCCAGTTT | Ea175 |
| | | GAATAAGACAATG | |
| 10e | RPA Ea175 R | TGAAACACAAGAATGGAAATGT | Ea175 |
| 1b | RPA ssDNA1 F with T7 | gaaattaatacgactcactatagggGATCCTCTA | ssDNA1 |
| | | GAAATATGGATTACTTGGTAGAACAG | |
| 1b | RPA ssDNA1 R | GATAAACACAGGAAACAGCTATGACCATGATTAC | ssDNA1 |
| | | G | |
| 1b | RPA lectin F with T7 | gaaatTAATACGACTCACTATAGGGTCAATAAGG | Lectin |
| | | TTGACGAAAACGGCAC | |
| 1b | RPA lectin R | TAGAAGGTGAAGTTGAAGGAAGCGG | Lectin |
| 1c | RPA ssDNA1 F with T7 | gaaattaatacgactcactatagggCATCCTCTA | ssDNA1 |
| | | GAAATATGGATTACTTGGTAGAACAG | |
| 1c | RPA ssDNA1 R | GATAAACACAGGAAACAGCTATGACCATGATTAC | ssDNA1 |
| | | G | |
| 1c | RPA lectin F with T7 | gaaatTAATACGACTCACTATAGGGTCAATAAGG | Lectin |
| | | TTGACGAAAACGGCAC | |
| 1c | RPA lectin R | TAGAAGGTGAAGTTGAAGGAAGCGG | Lectin |

TABLE 4
HDA primers used in this study
(SEQ ID No. 3343 and 3344)

| FIG. | Name | Sequence | Target |
|---|---|---|---|
| 10e | HDA Ea175 F | gaaattaatacgactcactatagg | Ea175 |
| | with T7 | gGGCCAGTTTGAATAAGACAATG | |
| 10e | HDA Ea175 R | TGAAACACAAGAATGGAAATGT | Ea175 |

TABLE 5
Reporter sequences used in this study

| | | | | Antigen/ | Compatible |
|---|---|---|---|---|---|
| FIG. | Name | Sequence | Flurorphore | quencher | enzyme |
| 11b | Rnase Alert v2 | N/A | N/A | N/A | LwaCas13a/ |
| | | | | | CcaCas13b |
| 6a | Rnase Alert v2 | N/A | N/A | N/A | LwaCas13a/ |
| | | | | | CcaCas13b |
| 6b | Rnase Alert v2 | N/A | N/A | N/A | LwaCas13a/ |
| | | | | | CcaCas13b |
| 6c | Rnase Alert v2 | N/A | N/A | N/A | LwaCas13a/ |
| | | | | | CcaCas13b |
| 6d | Rnase Alert v2 | N/A | N/A | N/A | LwaCas13a/ |
| | | | | | CcaCas13b |
| 6e | Single-plex lateral | /56-FAM/rUrUrUrUrUrU/3Bio/ | FAM | Biotin | LwaCas13a/ |
| | flow reporter | | | | CcaCas13b |
| 6f | Single-plex lateral | /56-FAM/rUrUrUrUrUrU/3Bio/ | FAM | Biotin | LwaCas13a/ |
| | flow reporter | | | | CcaCas13b |
| 7b | Ranse Alert v2 | N/A | N/A | N/A | LwaCas13a/ |
| | | | | | CcaCas13b |
| 7c | Ranse Alert v2 | N/A | N/A | N/A | LwaCas13a/ |
| | | | | | CcaCas13b |
| 7e | Single-plex lateral | /56-FAM/rUrUrUrUrUrU/3Bio/ | FAM | Biotin | LwaCas13a/ |
| | flow reporter | | | | CcaCas13b |
| 7h | Poly-U reporter | /56-FAM/rUrUrUrUrU/3IABkFQ/ | FAM | Iowa Black | LwaCas13a/ |
| | | | | FQ | CcaCas13b |
| 7i | Poly-U reporter | /56-FAM/rUrUrUrUrU/3IABkFQ/ | FAM | Iowa Black | LwaCas13a/ |
| | | | | FQ | CcaCas13b |
| 7k | Single-plex lateral | /56-FAM/rUrUrUrUrUrU/3Bio/ | FAM | Biotin | LwaCas13a/ |
| | flow reporter | | | | CcaCas13b |
| 8b | LwaCas13a | /56-FAM/TArArUGC/3IABkFQ/ | FAM | Iowa Black | LwaCas13a |
| | Fluorescence | | | FQ | |
| | reporter | | | | |
| 8b | CcaCas13b | /5HEX/TArUrAGC/3IABkFQ/ | HEX | Iowa Black | CcaCas13b |
| | Fluorescence | | | FQ | |
| | reporter | | | | |
| 8d | LwaCas13a | /5TYE665/T*A*rArUG*C*/3 | TYE 665 | AlexaFluor | LwaCas13a |
| | Lateral Flow | AlexF488N/ | | 488 | |
| | reporter | | | | |
| 8d | CcaCas13b | /5TYE665/T*A*rUrAG*C*/3 | TYE 665 | FAM | CcaCas13b |
| | Lateral Flow | 6-FAM | | | |
| | reporter | | | | |
| 8d | LwaCas13a | /5TYE665/T*A*rArUG*C*/3 | TYE 665 | AlexaFluor | LwaCas13a |
| | Lateral Flow | AlexF488N/ | 488 | | |
| | reporter | | | | |
| 8d | CcaCas13b | /5TYE665/T*A*rUrAG*C*/3 | TYE 665 | FAM | CcaCas13b |
| | Lateral Flow | 6-FAM/ | | | |
| | reporter | | | | |
| 9a | Rnase Alert v2 | N/A | N/A | N/A | LwaCas13a/ |
| | | | | | CcaCas13b |
| 12a | Poly-U reporter | /56-FAM/rUrUrUrUrU/3IABkFQ/ | FAM | Iowa Black | LwaCas13a/ |
| | | | | FQ | CcaCas13b |
| 12c | Single-plex lateral | /56-FAM/rUrUrUrUrU/3Bio/ | FAM | Biotin | LwaCas13a/ |
| | flow reporter | | | | CcaCas13b |
| 12d | Poly-U reporter | /56-FAM/rUrUrUrUrU/3IABkFQ/ | FAM | Iowa Black | LwaCas13a/ |
| | | | | FQ | CcaCas13b |
| 12f | Single-plex lateral | /56-FAM/rUrUrUrUrU/3Bio/ | FAM | Biotin | LwaCas13a/ |
| | flow reporter | | | | CcaCas13b |
| 10b | Helicase reporter | /56-FAM/CAGAGGAACGTCTATCTA | FAM | N/A | UvrD |
| | FAM | ACGGTTGGTATCTTGAATGCTCAGTC | | | helicases |
| | (SEQ ID NO: 3345) | CCTTT | | | |
| 10b | Helicase reporter | AAAGGGACTGAGCATTCAAGATACCA | N/A | BHQ-1 | UvrD |
| | BHQ1 | ACCGTTAGATAGACGTTCCTCTG/ | | | helicases |
| | (SEQ ID NO: 3346) | 3BHQ_1/ | | | |
| 10d | Poly-U reporter | /56-FAM/rUrUrUrUrU/3IABkFQ/ | FAM | Iowa Black | LwaCas13a/ |
| | | | | FQ | CcaCas13b |
| 10e | Poly-U reporter | /56-FAM/rUrUrUrUrU/3IABkFQ/ | FAM | Iowa Black | LwaCas13a/ |
| | | | | FQ | CcaCas13b |
| 1b | FAM LwaCas13a | /56-FAM/TArArUGC/3Bio/ | FAM | Biotin | LwaCas13a |
| | Lateral Flow | | | | |
| | reporter | | | | |
| 1b | FAM CcaCas13b | /56-FAM/TArUrAGC/3Dig_N/ | FAM | DIG | CcaCas13b |
| | Lateral Flow | | | | |
| | reporter | | | | |
| 1c | FAM LwaCas13a | /56-FAM/TArArUGC/3Bio/ | FAM | Biotin | LwaCas13a |
| | Lateral Flow | | | | |
| | reporter | | | | |
| 1c | FAM CcaCas13b | /56-FAM/TArUrAGC/3Dig_N/ | FAM | DIG | CcaCas13b |
| | Lateral Flow | | | | |
| | reporter | | | | |
| 1e | LwsCas13a | /5TYE665/T*A*rArUG*C*/3 | TYE 665 | AlexaFlour | LwaCas13a |
| | Lateral Flow | AlexF488N/ | | 488 | |
| | reporter | | | | |
| 1e | CcaCas13b | /5TYE665/T*A*rUrAG*C*/3 | TYE 665 | FAM | CcaCas13b |
| | Lateral Flow | 6-FAM | | | |
| | reporter | | | | |
| 1e | AsCas12a | /5TYE665/CCCCC/3Dig_N/ | TYE 665 | DIG | AsCas12a |
| | Lateral Flow | | | | |
| | reporter | | | | |
| 1f | LwaCas13a | /5TYE665/T*A*rArUG*C*/3 | TYE 665 | AlexaFlour | LwaCas13a |
| | Lateral Flow | AlexF488N/ | | 488 | |
| | reporter | | | | |
| 1f | CcaCas13b | /5TYE665/T*A*rUrAG*C*/3 | TYE 665 | FAM | CcaCas13b |
| | Lateral Flow | 6-FAM | | | |
| | reporter | | | | |
| 1f | AsCas12a | /5TYE665/CCCCC/3Dig_N/ | TYE 665 | DIG | AsCas12a |
| | Lateral Flow | | | | |
| | reporter | | | | |

TABLE 6
Cas13 proteins used in this study

| | Protein | | | Accession |
|---|---|---|---|---|
| Abbreviation | name | Strain name | Benchling link | number |
| Lwa | LwaCas13a | Leptotrichia wadei | https://benchling.com/s/seq- | WP_021746774.1 |
| | | | 66CfLwu7sLMQMbcXe7Ih | |
| Cca | CcaCas13b | Capnocytophaga canimorsus | https://benchling.com/s/seq- | WP_013997271 |
| | | | BNVzFUQjqSnkYLARxLwE | |

TABLE 7
Helicase proteins used in this study

| | | | | Accession number |
|---|---|---|---|---|
| | Protein | Strain | Superhelicase | (lacks superhelicase |
| Abbreviation | name | name | mutation | mutations) |
| Tte | Tte-UvrD | Thermoanaerobacter | − | AAM23874.1 |
| | | tengcongensis | | |
| Super Tte | Super Tte-UvrD | Thermoanaerobacter | + | AAM23874.1 |
| | | tengcongensis | | |
| Tet | Tet-UvrD | Thermoanaerobacter | − | WP_003870487.1 |
| | | ethanolicus | | |
| Super Tet | Super Tet-UvrD | Thermoanaerobacter | + | WP_003870487.1 |
| | | ethanolicus | | |
| Bsp | Bsp-UvrD | Bacillus sp. FJAT-27231 | − | WP_049660019.1 |
| Super Bsp | Super Bsp-UvrD | Bacillus sp. FJAT-27231 | + | WP_049660019.1 |
| Bme | Bme-UvrD | Bacillus megaterium | + | WP_034654680.1 |
| Bsi | Bsi-UvrD | Bacillus simplex | + | WP_095390358.1 |
| Pso | Pso-UvrD | Paeniclostridium sordellii | + | WP_055343022.1 |

### EXAMPLES

### Example 1—One-Pot HDA-SHERLOCK is Capable of Quantitative Detection of Different Targets

[0288] A schematic of helicase reporter for screening DNA unwinding activity is shown in FIG. 1A. Temperature sensitivity screening of different helicase orthologs with and without super-helicase mutations using the high-throughput fluorescent reporter was performed (FIG. 1B). A schematic of one-pot SHERLOCK with RPA or Super-HDA is shown in FIG. 1C. Kinetic curves were generated of one-pot HDA detection of a restriction endonuclease gene fragment (Ea81) from Treponema denticola (FIGS. 1D, 1E). FIG. 1F illustrates the quantitative nature of HDA-SHERLOCK compared to one-pot RPA.

### Example 2—One-Pot RPA-SHERLOCK is Capable of Rapid Detection of Different Targets

[0289] Kinetic curves were also generated of one-pot RPA detection of a restriction endonuclease gene fragment (Ea175) from Treponema denticola (FIG. 2A). One-pot RPA end-point detection of Ea175 gene fragment and one-pot RPA lateral flow readout of the Ea175 fragment in 30 minutes are shown in FIGS. 2B and 2C, respectively. Kinetic curves were generated of one-pot RPA detection of a restriction endonuclease gene fragment (Ea81) from Treponema denticola (FIG. 2D). One-pot RPA end-point detection of Ea81 gene fragment and one-pot RPA lateral flow readout of the Ea81 fragment in 3 hours are shown in FIGS. 2E and 2F, respectively. Kinetic curves were generated of one-pot RPA detection of acyltransferase gene fragment (acyltransferase) from P. aeruginosa (FIG. 2G). One-pot RPA end-point detection of acyltransferase gene fragment and one-pot RPA lateral flow readout of the acyltransferase fragment in 3 hours are shown in FIGS. 2H and 2I, respectively.

### Example 3—Multiplexed Lateral Flow Detection with SHERLOCK

[0290] A schematic of the proposed multiplex lateral flow design with RPA preamplification for two probes is shown in FIG. 3A. Multiplexed lateral flow detection of two targets (ssDNA 1 and a gene fragment of lectin from soybean) was carried out as described (FIG. 3B). In one experiment, pre-amplification by RPA was done prior to detection, allowing for detection down to 2 aM (FIG. 3C). A schematic for custom-made lateral flow strips enabling detection of three targets simultaneously with SHERLOCK is shown in FIG. 3D. Multiplexed lateral flow strips using LwaCas13a, CcaCas13b, and AsCas12a effector proteins were used to detect three targets in various combinations—ssDNA1, Zika ssRNA, and Dengue ssRNA. Results are shown in FIG. 3E. Tye-665 fluorescent intensity for these three targets was quantified as shown in FIG. 3F.

### Example 4—SHERLOCK Guide Design Model is Capable of Predicting Highly Active crRNAs for SHERLOCK Detection

[0291] Previous tiling of SHERLOCK guides along targets has demonstrated significant variation of signal between guide RNAs with LwaCas13a and CcaCas13b (Gootenberg, 2018), which has an effect on the overall kinetics and sensitivity of the assay. While a sequence constraint known as a protospacer flanking site (PFS) exists for Cas13 targeting (Abudayyeh, 2016; Smargon, 2017), many guide RNAs without the correct PFS retain activity. Applicants therefore hypothesized that some combination of the PFS and other sequence and guide features might be driving the efficacy of Cas13 detection. A machine learning approach was applied to train a logistic regression model on the collateral activity of hundreds of guides, using a combination of guide sequence, flanking target sequence, guide position, and guide GC content as input features (FIG. 11a). Applicants designed a panel of 410 crRNAs for LwaCas13a and 476 crRNAs for CcaCas13b across 5 different ssRNA targets: Ebola, Zika, the thermonuclease transcript from S. aureus, Dengue, and a synthetic ssRNA target (ssRNA 1). Using in vitro transcription to express these guides, the resulting collateral activity of LwaCas13a and CcaCas13b was evaluated by fluorescent reporter assays and significant variation between the crRNAs was found (FIG. 11b and FIG. 9a).

[0292] A schematic of the computational workflow of the SHERLOCK guide design tool is shown in FIG. 4A. Collateral activities of LwaCas13 with crRNAs tiling five synthetic targets are shown in FIG. 4B. FIG. 4C shows ROC and AUC results of the best performing logistic regression model trained using the data from FIG. 4B. Mono-nucleotide and di-nucleotide feature weights of the best performing logistic regression model are shown in FIGS. 4D and 4E, respectively. Validation data of predicted best and worst performing crRNAs on three targets are shown in FIG. 4F. FIG. 4G shows predicted scores of multiple novel guides on three targets compared to guide activity.

[0293] Given the wide variance of guide efficiencies for both LwaCas13a and CcaCas13b, Applicants designed a model that would select for the “best” performing guides for each enzyme. As a majority of LwaCas13a guides had activity above background (FIG. 11b, FIG. 9a), Applicants selected, on a per-target basis, for guides with 2-fold activity over the median activity as “best” performing guides. In contrast, as a majority of CcaCas13b guides were near background, (FIG. 11b, FIG. 9a), “best” performing guides were classified as the top quintile for each target tested. For each ortholog, a logistic regression model was trained to distinguish best performing guides from all other guides, based on the input features. The length of the flanking target region was considered as a free parameter and selected during cross-validation by maximizing the area under the curve (AUC) of the receiver operator characteristic (ROC) for each model. The data was split into train/test/validation sets and used to train the logistic model with three-fold cross validation with a hyperparameter search. This training process resulted in models with AUC of 0.84 and 0.89 for LwaCas13a and CcaCas13b, respectively (FIG. 11c). Examination of the full feature set for the model (FIG. 9b, 9c) revealed strong weights for both orthologs in the flanking regions that recapitulated the known PFS preferences of the enzymes (3′ H for LwaCas13a and 5′-D/3′-NAA for CcaCas3b) (FIG. 11d) (Abudayyeh, 2016; Smargon, 2017), providing biological validation to the model weights. To make design tool easily accessible and usable by the community, Applicants provide simple tool (sherlock.genome-engineering.org) that allows for LwaCas13a and CcaCas13b guide design through an easy-to-use interface online.

[0294] To further validate the models beyond the cross-validation, a panel of new crRNAs was designed on the thermonuclease transcript, as well as two additional transcripts from the long and short isoforms of the PML/RARA fusion associated with acute promyelocytic leukaemia (APML). Applicants found that both the LwaCas13a and CcaCas13b models succeeded at predicting guide RNA activity with significance (FIG. 6a, 6b). Additionally, the top and bottom predicted crRNAs display drastically different kinetics and sensitivity, showcasing the importance of the predictive tool (FIG. 6c, 6d). While the improvement in kinetics for top predicted crRNAs is relevant for increasing the speed of all SHERLOCK assays, the signal increase is especially relevant for portable versions of the test as color generation on the lateral flow strips is very sensitive to the overall collateral activity levels. Applicants evaluated the top and worst predicted crRNAs for the thermonuclease, short APML, and long APML targets on lateral flow strips and found that only the top predicted crRNAs generated a functional test suitable for portable detection (FIG. 6e, 6f). Moreover, Applicants also validated the LwaCas13a prediction model for in vivo transcript knockdown by targeting the Gaussia luciferase (Gluc) transcript in HEK293FT cells. Applicants found that guides predicted to have strong activity were significantly more effective at knockdown than either guides with poor predicted performance or just a random selection of guides (FIG. 12).

[0295] Applicants next attempted to combine Applicants' top predicted crRNAs with recombinase polymerase amplification (RPA)(Piepenburg, 2006) in a SHERLOCK reaction to attain single-molecule sensitivity. As previous versions of the SHERLOCK assay have been primarily two-step protocols with an initial RPA pre-amplification followed by T7 transcription and Cas13 detection, Applicants focused on enhancing the combination of these steps in order to generate a simplified SHERLOCK assay. After optimizing the relative RPA pellet amount to the overall Cas13 detection buffer, Applicants designed a one-pot SHERLOCK assay for the acyltransferase transcript derived from P. aeruginosa. Applicants found that the top predicted LwaCas13a allowed for fast and highly-sensitive (20 aM) detection of acyltransferase in a one-pot reaction format compared to the worst predicted crRNA (FIG. 7a-d). Additionally, the top predicted crRNA enabled an acyltransferase lateral flow assay with sensitivity down to 20 aM (FIG. 7e, 7f). Similarly, for CcaCas13b, Applicants used the guide prediction model to generate a one-pot SHERLOCK assay for detection of the thermonuclease transcript (FIG. 7g). As with LwaCas13a, Applicants found that CcaCas13b could achieve fast and sensitive detection down to 3 aM by fluorescence (FIG. 7h-7j) and 20 aM by portable lateral flow (FIG. 7k, 7l). The optimized one-pot format was readily extendable to additional targets, including Ea175 and Ea81 transcripts from Treponema denticola, and could be adapted for sensitive lateral flow tests (FIG. 10A-10F).

[0296] Although SHERLOCK with RPA provided rapid detection of targets in the attomolar range with one-pot assays, Applicants hypothesized that alternative amplification strategies could provide less bias and result in improved quantitation. Helicase displacement amplification (HDA)(Vincent, 2004), relies on helicases to separate the DNA duplex and allow for primer invasion and amplification. To enable rapid HDA, Applicants profiled a set of UvrD helicase orthologs with a helicase reporter assay (FIG. 1a)(Ozes, 2014) based on the separation of two DNA strands, each labeled with either a fluorophore or quencher. To augment Applicants' selection of helicases, Applicants also introduced a catalytic pair of super mutations (D403A/D404A) found to improve the activity of E. coli helicase II (UvrD)(Meiners, 2014) into these orthologs at analogous sites through sequence alignment (FIG. 1b). Profiling of orthologs with and without the super mutations revealed several candidates with strong helicase activity at 37° C., including Super TteUvrD, which allowed for 37° C. isothermal amplification and compatibility with Cas13-based collateral detection. Applicants combined Super TteUvrD with polymerases, single-stranded binding proteins, and LwaCas13a to create a one-pot super HDA SHERLOCK reaction. This reaction was capable of single molecule detection of the Ea175 target at 100 minutes, compared to 20 minute detection with one-pot RPA (FIG. 1c, ld). However, despite the reduced speed of one-pot super HDA SHERLOCK, the kinetics of the reaction were more representative of the input concentration, with strong correlation between input concentration and the Vₘₐₓ, in contrast to RPA SHERLOCK (FIG. 1e). Therefore, this one-pot super HDA SHERLOCK assay can provide a more quantitative alternative to single-pot RPA SHERLOCK.

[0297] Finally, the one-pot RPA SHERLOCK assay was expanded to allow for multiplexing of multiple targets (FIG. 8a). Applicants first tested whether one-pot SHERLOCK could allow for multiplexed detection of two targets, Ea175 and thermonuclease, using LwaCas13a and CcaCas13b, respectively. By detecting the collateral activity of each enzyme in separate fluorescent channels, FAM and HEX, Applicants were able to achieve 2 aM detection of each target (FIG. 8b). Next, Applicants adapted the lateral flow format to allow for detection of two targets. As the previous lateral flow design relied on general capture of antibody that was not bound by intact reporter RNAs (Gootenberg, 2018), it would not be suitable for detecting two targets. Instead, Applicants adapted a lateral flow approach with two separate detection lines consisting of either deposited streptavidin or anti-DIG antibodies. These lines capture reporter RNA decorated with a fluorophore and either Biotin or DIG, allowing fluorescent visualization of signal loss at detection lines due to collateral activity and cleavage of corresponding reporter RNA. Applicants evaluated this lateral flow design using a two-step SHERLOCK format for detection of lectin DNA and a synthetic DNA target (ssDNA 1) (FIG. 3a), and found that Applicants could detect down to 2 aM of each target (FIG. 3b, 3c). Applicants then applied the one-pot multiplexed SHERLOCK assay for thermonuclease and Ea175 using to the new lateral flow format (FIG. 8c) and found that Applicants could detect down to 20 aM of each target successfully (FIG. 8d). As this lateral flow design can be extended indefinitely by depositing any molecule that is part of an orthogonal hybridization pair, Applicants developed lateral flow strips capable of detection three targets simultaneously by striping the anti-Alexa 488 antibody to capture Alexa 488 on a reporter DNA (FIG. 3d). By augmenting the lateral flow assay with Cas12a from Acidaminococcus sp. BV3L6 (AsCas12a), Applicants were able to independently assay a third target in an additional cleavage channel sensing DNA collateral activity (Gootenberg, 2018). This design was capable of independently assaying for three targets, Zika ssRNA, Dengue ssRNA, and ssDNA1 simultaneously (FIG. 3e, 3f).

[0298] In this study, Applicants show that SHERLOCK assays can be reliably designed with high sensitivity and fast kinetics using a machine learning approach, accessible at sherlock.genome-engineering.org. This guide design tool has broad applicability for both in vitro and in vivo RNA targeting applications and can be readily extended to include other useful Cas13 and Cas12 orthologs with collateral activity, including Cas13d (Yan, 2018; Konermann, 2018), Cas12a (Zetsche, 2015; Chen, 2018; Li, 2018), Cas12b (Shmakov, 2015; Li, 2018), and many other Cas12/Cas13 family members (Yan, 2019; Shmakov, 2017). Using Applicants' design tool, Applicants generate highly sensitive assays suitable for portable lateral flow detection of one or two targets using LwaCas13a and CcaCas13b, which can be performed in a single step, reducing pipetting steps and eliminating potential contamination concerns from opening of post-amplification samples. Additionally, by augmenting with DNA collateral detection with AsCas12a, Applicants can perform multiplexing of three targets in a portable lateral flow format. Applicants also apply helicase engineering to develop a new CRISPR-detection compatible amplification method, super HDA, and demonstrate the quantitative nature of super HDA SHERLOCK. The advances here increase the accessibility of the SHERLOCK platform, bringing it closer to deployment as a simple, portable nucleic acid diagnostic.

### Example 2

[0299] Applicants use the machine learning model predicts the efficiency of Cas13 transcript knockdown in mammalian cells. We apply our guide prediction model to design optimal guides for sensitive detection of chromosomal fusion rearrangements characteristic of acute promyelocytic leukemia (APML) and acute lymphoblastic leukemia (ALL) in a multiplexed lateral flow readout.

[0300] To further validate the machine learning models beyond the cross-validation, we designed a panel of new crRNAs using the machine learning model targeting either the thermonuclease transcript or two additional transcripts from the long and short isoforms of the PML/RARA fusion associated with acute promyelocytic leukemia (APML). We found that both the LwaCas13a and CcaCas13b models succeeded at predicting guide RNA activity (LwaCas13a model validation has R values of 0.79, 0.54, and 0.41; CcaCas13b model validation has R values of 0.44, 0.69, and 0.89) (FIG. 13a, Supplementary FIG. 17a). Additionally, the best and worst predicted crRNAs display drastically different kinetics and sensitivity (FIG. 13b, FIG. 17b). Although the improvement in kinetics for best predicted crRNAs is relevant for increasing the speed of all SHERLOCK assays, the signal increase is especially relevant for portable versions of the test, as color generation on the lateral flow strips is sensitive to the overall collateral activity levels. While the guide model was trained for maximizing overall signal generation, the increase in kinetics was an added benefit that was not explicitly trained for in the machine learning model development. We evaluated the best and worst predicted crRNAs for the thermonuclease, short APML, and long APML targets on lateral flow strips and found that only the best predicted crRNAs generated a functional test suitable for portable detection (FIG. 13c, FIG. 17c). Moreover, we also validated the LwaCas13a prediction model for in vivo transcript knockdown by targeting the Gaussia luciferase (Gluc) transcript in HEK293FT cells and evaluating previously published LwaCas13a mammalian RNA knockdown data of reporter and endogenous transcripts (FIG. 13d)¹⁴. We found that guides predicted to have strong activity were significantly more effective at knockdown of Gluc and KRAS (FIG. 13e) and that Gluc guides with predicted good performance outperformed guides either with poor predicted performance or selected randomly (FIG. 12).

[0301] Previous versions of the SHERLOCK assay have been a two-step format with an initial recombinase polymerase amplification (RPA)¹⁹ followed by T7 transcription and Cas13 detection. To simplify the SHERLOCK assay, we focused on optimizing a one-pot amplification and detection protocol by combining both steps into a single reaction with the best predicted crRNAs. We designed a one-pot SHERLOCK assay for a synthetic acyltransferase transcript derived from Pseudomonas aeruginosa, a significant human pathogen that requires rapid diagnosis. We found that the best predicted crRNA for LwaCas13a allowed for fast and highly-sensitive (20 aM) detection of acyltransferase in a one-pot reaction format compared to the worst predicted crRNA (FIG. 9a-9d). Additionally, the best predicted crRNA enabled an acyltransferase lateral flow assay with sensitivity down to 20 aM (FIG. 9e, 9f). Similarly, for CcaCas13b, we used the guide prediction machine learning model to generate a one-pot SHERLOCK assay for detection of the thermonuclease transcript (FIG. 9g). As with LwaCas13a, we found that CcaCas13b could achieve fast and sensitive detection down to 3 aM by fluorescence (FIG. 9h-9j) and 20 aM by portable lateral flow (FIG. 9k, 9l). The optimized one-pot format was readily extendable to additional targets, including the Ea175 and Ea81 transcripts from Treponema denticola, a gram-negative bacteria that can cause severe periodontal disease, and could be adapted for sensitive lateral flow tests (FIG. 10A-10F).

[0302] To achieve even higher sensitivity with one-pot assays, we explored alternative amplification strategies, which could provide less bias and result in a more quantitative assay. Helicase displacement amplification (HDA)²⁰ relies on helicases to separate the DNA duplex and allow for primer invasion and amplification, usually at high temperatures like 65° C. To enable rapid HDA, we profiled a set of UvrD helicase orthologs with engineered mutations²¹ with a helicase reporter assay (FIG. 1a, 1b)²² and found several candidates with strong helicase activity at 37° C., including Super UvrD from Thermoanaerobacter tengcongensis (TteUvrD), which allowed for 37° C. isothermal amplification and compatibility with Cas13-based collateral detection. We combined Super TteUvrD with polymerases, single-stranded binding proteins, and LwaCas13a to create a one-pot super HDA SHERLOCK reaction, which was capable of single molecule detection of the Ea175 target at 100 minutes and was highly quantitative (FIG. 1c-1e).

[0303] We further expanded the one-pot RPA SHERLOCK assay to allow for multiplexing of multiple targets (FIG. 14a). We first tested whether one-pot SHERLOCK could simultaneously detect two targets, Ea175 and thermonuclease, using LwaCas13a and CcaCas13b, respectively. By detecting the collateral activity of each enzyme in separate fluorescent channels, FAM and HEX, we were able to achieve 2 aM detection of each target (FIG. 14b). Next, we adapted the lateral flow format to allow for detection of two targets. As the previous lateral flow design relied on general capture of antibody that was not bound by intact reporter RNAs¹, it is not suitable for detecting two targets. Instead, we adapted a lateral flow approach with two separate detection lines consisting of either deposited streptavidin or anti-DIG antibodies. These lines capture reporter RNA decorated with a fluorophore and either Biotin or DIG, allowing fluorescent visualization of signal loss at detection lines due to collateral activity and cleavage of corresponding reporter RNA. We evaluated this lateral flow design using a two-step SHERLOCK format for detection of lectin DNA and a synthetic DNA target (ssDNA 1) (FIG. 3a), and found that we could detect down to 2 aM of each target (FIG. 3b, 3c). We then applied the one-pot multiplexed SHERLOCK assay for thermonuclease and Ea175 to the new lateral flow format (FIG. 14c) and found that we could detect down to 20 aM of each target successfully (FIG. 14d, 14e). As this lateral flow design can be extended further by depositing any molecule that is part of an orthogonal hybridization pair, we developed lateral flow strips capable of detecting three targets simultaneously by striping the anti-Alexa 488 antibody to capture Alexa 488 on a reporter DNA (FIG. 3d). By augmenting the lateral flow assay with Cas12a from Acidaminococcus sp. BV3L6 (AsCas12a), we were able to independently assay a third target in an additional cleavage channel sensing DNA collateral activity¹. This design was capable of independently assaying three targets, Zika ssRNA, Dengue ssRNA, and ssDNA1 simultaneously (FIG. 3e, 3f).

[0304] Lastly, we sought to apply SHERLOCK detection to a clinical setting, where using the best crRNA for a given target is essential for fast and sensitive performance. Acute promyelocytic leukaemia (APML) and acute lymphocytic leukemia (ALL) cancers are caused by chromosomal fusions in the transcribed mRNA, and distinguishing these rapidly is critical for effective treatment and prognosis²³. To design robust clinical-grade SHERLOCK assays, we employed the Cas13 guide design tool to predict top guides for three fusion transcripts characteristic of APML and ALL cancers: PML-RARa Intron/exon 6 fusion, PML-RARa Intron 3 fusion, and BCR-ABL p210 b3a2 fusion²³ (FIG. 15a). The developed SHERLOCK assay for these three targets (FIG. 18A-18D) was used to predict APML or ALL presence across a blinded set of 17 patient bone marrow samples, as well as 2 known samples (samples 12 and 15 in FIG. 15A-15F). Cas13 detection using the best predicted guide achieved clear fluorescence detection in 45 minutes or less for all samples verified by RT-PCR (FIG. 15b, 15c, 15d, FIG. 19A-19E). Detection with a lateral flow readout also yielded clear identification of the RNA fusion present in every sample (FIG. 15e, FIG. 20). Lastly, we showed that our multiplexed lateral flow test could be deployed to simultaneously test for multiple fusion transcripts (FIG. 16A-16C), enabling a simple, rapid, and portable test that can detect several cancer fusion transcripts simultaneously.

[0305] Together, these results demonstrate that SHERLOCK assays can be reliably designed with high sensitivity and fast kinetics using a machine learning approach, accessible at sherlock.genome-engineering.org. This guide design tool has broad applicability for both in vitro and in vivo RNA targeting applications and can be readily extended to include other useful Cas13 and Cas12 orthologs with collateral activity, including Cas13d^{13,24}, Cas12a^{8,9,11}, Cas12b^{5,12}, and many other Cas12/Cas13 family members^{7,25}. Using our design tool, we generated highly sensitive assays suitable for portable lateral flow detection of one or two targets using LwaCas13a and CcaCas13b, which can be performed in a single step, reducing pipetting steps and eliminating potential contamination of post-amplification samples. Additionally, by utilizing DNA collateral detection with AsCas12a, we can perform multiplexing of three targets in a lateral flow format. With these improvements, SHERLOCK can now achieve multiplexing of up to four targets simultaneously by fluorescence¹ and three targets by lateral flow. We also apply helicase engineering to develop a new CRISPR-detection compatible amplification method, super HDA, and demonstrate the quantitative nature of super HDA SHERLOCK. Finally, we demonstrate the facile applicability of the guide design model to develop a clinically relevant test for APML and ALL cancers with high sensitivity and performance in a portable lateral flow format. The advances here increase the accessibility of the SHERLOCK platform, deploying it as a simple, portable nucleic acid diagnostic with broad clinical utility and provide a user-friendly web tool for Cas13 guide design for both in vivo RNA targeting and SHERLOCK assays.

### Methods

### Protein Expression and Purification of Cas13

[0306] Expression and purification of LwaCas13a and CcaCas13b was performed as previously described^{1,2}. In brief, we transformed bacterial expression vectors into Rosetta™ 2(DE3)pLysS Singles Competent Cells (Millipore) and scaled up bacterial growth in 4 L of Terrific Broth 4 growth media (TB). Cell pellets were lysed by high-pressure cell disruption using the LM20 Microfluidizer system at 27,000 PSI and freed protein was bound via StrepTactin Sepharose (GE) resin. After washing, protein was released from the resin via SUMO protease digestion overnight and protein was subsequently purified by cation exchange chromatography and then gel filtration purification using an AKTA PURE FPLC (GE Healthcare Life Sciences). Eluted protein was then concentrated into Storage Buffer (600 mM NaCl, 50 mM Tris-HCl pH 7.5, 5% glycerol, 2 mM DTT) and frozen at −80° C. for storage.

Nucleic Acid Target and crRNA Preparation

[0307] Nucleic acid targets and crRNAs were prepared as previously described^{1,2}. Briefly, targets were either used as ssDNA or PCR amplified with NEBNext PCR master mix, gel extracted, and purified using MinElute gel extraction kits (Qiagen). For RNA detection reactions, RNA was prepared by using either ssDNA targets with double-stranded T7-promoter regions or fully double-stranded PCR products in T7 RNA synthesis reactions at 30° C. using the HiScribe T7 Quick High Yield RNA Synthesis Kit (New England Biolabs). RNA was then purified using MEGAclear Transcription Clean-up kit (Thermo Fisher).

[0308] crRNAs were synthesized by using ultramer ssDNA substrates (IDT) that were double stranded in the T7 promoter region through an annealed primer. Synthesized crRNAs were prepared using these templates in T7 expression assays at 37 C using the HiScribe T7 Quick High Yield RNA Synthesis kit (NEB). RNAs were then purified using RNAXP clean beads (Beckman Coulter) at 2× ratio of beads to reaction volume, with an additional 1.8× supplementation of isopropanol (Sigma).

[0309] _All crRNA and target sequences are listed in Tables 1 and 2, respectively.

### Fluorescent Cleavage Assay

[0310] Cas13 detection assays were performed as previously described^{1,2} In brief, 45 nM Cas13 protein (either CcaCas13b or LwaCas13a), 20 nM crRNA, 1 nM target RNA, 125 nM RNAse Alert v2 (Invitrogen), and 1 unit/μL murine RNase inhibitor (NEB) were combined together in 20 μL of cleavage buffer (20 mM HEPES, 60 mM NaCl, 6 mM MgCl2, pH 6.8). Reactions were incubated at 37° C. on a Biotek plate reader for 3 hours with fluorescent kinetic measurements taken every 5 minutes.

SHERLOCK Nucleic Acid Detection with RPA

[0311] For RPA reactions, primers were designed using NCBI Primer-BLAST²⁶ under default parameters except for (100-140 nt), primer melting temperatures (54° C.-67° C.), and primer size (30-35 nt). All primers were ordered as DNA (Integrated DNA Technologies).

[0312] One-pot SHERLOCK-RPA reactions were carried out as previously described^{1,2} with slight modifications. Reactions were prepared with the following reagents (added in order): 0.5×RPA rehydration and 0.5× resuspended RPA lyophilized pellet, 2 mM rNTPs, 1.1 units/μL RNAse inhibitor, 1 unit/μL T7 RNA polymerase (Lucigen), 0.96 μM total RPA primers (0.48 μM each of forward primer with T7 handle and reverse primer), 57.8 nM Cas13 protein (CcaCas13b or LwaCas13a), 23.3 nM crRNA, 136.5 nM fluorescent substrate reporter, 5 mM MgCl2, 14 mM MgAc, and varying amounts of DNA target input.

[0313] For detection with fluorescent readout, either a quenched polyU FAM reporter (TriLink) or RNAse Alert v2 (Invitrogen), were used as reporters. 20 μL reactions were incubated for 2-6 hours at 37° C. on a Biotek plate reader with kinetic measurements taken either every 2.5 or 5 minutes. All reporter sequences are listed in Table 5.

[0314] One-pot SHERLOCK-RPA reactions were modified for multiplexing by maintaining total primer concentration at 0.96 μM over all four input primers (0.24 μM each of both forward primers with T7 handle and reverse primers), maintaining crRNA concentrations at 23.3 nM (with 11.7 nM each crRNA), maintaining Cas13 total protein concentration at 57.8 nM, (28.9 nM CcaCas13b and 28.9 nM LwaCas13a), and doubling total reporter concentration (136.5 nM LwaCas13a AU-FAM reporter; 136.5 nM CcaCas13b UA-HEX reporter; see Table 5 for all reporters). 20 μL reactions were incubated for 2-6 hours at 37° C. on a Biotek plate reader with kinetic measurements in wavelengths for HEX and FAM taken every 2.5 or 5 minutes.

### Protein Expression and Purification of UvrD Helicases

[0315] UvrD Helicases sequences were ordered as E. coli codon optimized gBlocks Gene Fragments (IDT) and cloned into TwinStrep-SUMO-expression plasmid via Gibson assembly. Alanine ‘Super-helicase’ mutants were generated using PIPE-site-directed mutagenesis cloning from the TwinStrep-SUMO-UvrD Helicase expression plasmids. In brief, primers with short overlapping sequences at their ends were designed to harbor the desired changes. After incomplete-extension PCR amplification (KAPA HiFi HotStart 2×PCR), reactions were treated with Dpn1 restriction endonuclease for 30 minutes at 37° C. to degrade parental plasmid. Two microliters of the reaction were directly transformed into Stble3 chemically competent E. coli cells. For expression, sequence verified plasmids were transformed into BL21(DE3)pLysE E. coli cells. For each UvrD Helicase variant, 2 L of Terrific Broth media (12 g/L tryptone, 24 g/L yeast extract, 9.4 g/L K2HPO, 2.2 g/L KH2PO4), supplemented with 100 μg/mL ampicillin, was inoculated with 20 mL of overnight starter culture and grown until OD600 0.4-0.6. Protein expression was induced with the addition of 0.5 mM IPTG and carried out for 16 hours at 21° C. with 250 RPM shaking speed. Cells were collected by centrifugation at 5,000 RPM for 10 minutes, and paste was directly used for protein purification (10-20 g total cell paste). For lysis, 10 g of bacterial paste was resuspended via stirring at 4° C. in 50 mL of lysis buffer (50 mM Tris-HCl pH 8, 500 mM NaCl, 1 mM BME (Beta-Mercapotethanol, Sigma) supplemented with 50 mg Lysozyme, 10 tablets of protease inhibitors (cOmplete, EDTA-free, Roche Diagnostics Corporation), and 500 U of Benzonase (Sigma). The suspension was passed through a LM20 microfluidizer at 25,000 psi, and lysate was cleared by centrifugation at 10,000 RPM, 4° C. for 1 hour. Lysate was incubated with 2 mL of StrepTactin superflow resin (Qiagen) for 2 hours at 4° C. on a rotary shaker. Resin bound with protein was washed three times with 10 mL of lysis buffer, followed by addition of 50 μL SUMO protease (in house) in 20 mL of IGEPAL lysis buffer (0.2% IGEPAL). Cleavage of the SUMO tag and release of native protein was carried out overnight at 4° C. in Econo-column chromatography column under gentle mixing on a table shaker. Cleaved protein was collected as flow-through, washed three times with 5 mL of lysis buffer, and checked on a SDS-PAGE gel.

[0316] Protein was diluted ion exchange buffer A containing no salt (50 mM Tris-HCl pH 8, 6 mM BME (Beta-Mercapotethanol, Sigma), 5% Glycerol, 0.1 mM EDTA) to get the starting NaCl concentration of 50 mM. Protein was then loaded onto a 5 mL Heparin HP column (GE Healthcare Life Sciences) and eluted over a NaCl gradient from 50 mM to 1 M. Fractions of eluted protein were analyzed by SDS-PAGE gel and Coomassie staining, pooled and concentrated to 1 mL using 10 MWCO centrifugal filters (Amicon). Concentrated protein was loaded in 0.5-3 mL 10 MWCO Slide-A-Lyzer Dialysis cassettes and dialyzed overnight at 4° C. against protein storage buffer (20 mM Tris-HCl, pH 7.5, 200 mM NaCl, 1 mM EDTA, 1 mM TCEP, 50% glycerol). Protein was quantified using Pierce reagent (Thermo) and stored at −20° C.

### Lateral Flow Readout of Cas13 and SHERLOCK

[0317] For single-plex detection with lateral flow readout, a FAM-RNA-biotin reporter was substituted in Cas13 or SHERLOCK reactions for the fluorescent reporter at a final concentration of 1 μM (unless otherwise indicated). 20 μL reactions were incubated between 30 and 180 minutes, after which the entire reaction was resuspended in 100 μL of HybriDetect 1 assay buffer (Milenia). Visual readout was achieved with HybriDetect 1 lateral flow strips (Milenia), and strips were imaged in a light box with a α7 III with 35-mm full-frame image sensor camera (Sony) equipped with a FE2.8/90 Macro G OSS lens.

[0318] Two-pot SHERLOCK-RPA multiplexed lateral flow reactions were adapted from previously described multiplexed fluorescent reactions^{1,2}. In brief, RPA reactions were performed with the TwistAmp® Basic (TwistDx) protocol with the exception that 280 mM MgAc was added prior to input DNA. Reactions were run with 1 μL of input for 1 hr at 37° C. Cas13 detection assays were performed with 45 nM purified Cas13, 22.5 nM crRNA, lateral flow RNA reporter (4 μM LwaCas13a multiplexed reporter; 2 μM CcaCas13b multiplexed reporter; see Table 5 for all reporters), 0.5 μL murine RNase inhibitor (New England Biolabs), and 1 μL of post-RPA input nucleic acid target in nuclease assay buffer (20 mM HEPES, 60 mM NaCl, 6 mM MgCl₂, pH 6.8). 20 μL reactions were suspended in 100 μL of HybriDetect 1 assay buffer (Milenia) and run on custom multiplexed strips (DCN Diagnostics). The custom lateral flow strips were designed to have capture lines containing Anti-digoxigenin antibodies (ab64509, abcam), Streptavidin, Anti-FITC antibodies (ab19224, abcam), and Anti-Alexa 488 antibodies (A619224, Life Technologies). The strips consisted of a 25 mm CN95 Sartorius nitrocellulose membrane, an 18 mm 6614 Ahlstrom synthetic conjugate pad for sample application, and a 22 mm Ahlstrom grade 319 paper wick pad. Strips were imaged using an Azure c400 imaging system in the Cy5 channel.

[0319] One-pot multiplexed SHERLOCK-RPA was adapted for lateral flow by lowering the CcaCas13b multiplexed reporter concentration to a concentration of 78 nM and the LwaCas13a reporter concentration to 1 μM (see Table 5 for all reporters). This was to accommodate for different fluorescent intensities observed for the reporter when binding to the DCN strips. Lateral flow reactions were resuspended in buffer, run on DCN strips, and imaged as described above.

### Fluorescent Helicase Activity Assay

[0320] Helicase substrate was generated by annealing 300 pmol of fluorescent 5′-FAM-top strand with 900 pmol of quencher 3′-BHQ1 bottom strand in 1× duplex buffer (30 mM HEPES, pH 7.5; 100 mM potassium acetate) for 5 minutes at 95° C., followed by slow cool down to 4° C. (1° C./5 seconds) in PCR thermocycler. After annealing, reactions were diluted 1:10 in Nuclease free water (Gibco). Helicase unwinding assays were carried out in 20 μL reactions containing 1× Thermopol buffer (NEB), 250 nM of annealed quenched helicase substrate, 3 mM ATP or 3 mM dATP (The-UvrD dATP), 200 nM UvrD Helicase and 500 nM of capture strand oligonucleotide. To determine temperature activity profiles, reactions and no helicase control were incubated at temperatures ranging from 37° C. to 62° C. with 5° C. intervals for 60 minutes in a PCR thermocycler. Reactions were immediately transferred to a 384-well plate (Corning®) and analysed on a fluorescent plate reader (BioTek) equipped with a FAM/HEX filter set.

SHERLOCK Nucleic Acid Detection with HDA

[0321] For detection with SHERLOCK-HDA, procedures for amplification were inspired by previously described isothermal helicase dependent amplification^{20,27} with significant modifications. Reactions were prepared with the following reagents: 1× Sau polymerase buffer (Intact Genomics), 2.5% PEG 30%, 1 mM rNTPs, 0.4 mM dNTPs, and 3 mM ATP, 1 units/μL RNAse inhibitor, 1.5 unit/μL T7 RNA polymerase (Lucigen), 0.4 μM total HDA primers (0.2 μM each of forward primer with T7 handle and reverse primer), 43.3 nM Cas13 protein (CcaCas13b or LwaCas13a), 19.8 nM crRNA, 125 nM fluorescent substrate reporter (quenched polyU FAM reporter, TriLink), 0.2 units/μL Sau polymerase, 25 ng/μL T4 gp32 protein (NEB), 6.25 ng UvrD helicase, and varying amounts of DNA target input. 20 μL reactions were incubated for 2-6 hours at 37° C. on a Biotek plate reader with kinetic measurements taken either every 2.5 or 5 minutes.

### Digital Droplet PCR Quantification of Input DNA

[0322] DNA and RNA dilution series used as input target for one-pot SHERLOCK-RPA amplification reactions were quantified separately using Droplet Digital PCR (BioRad), as described before^{1,2}. Briefly, ddPCR probes were ordered from IDT PrimeTime qPCR probes with a quenched FAM/ZEN reporter. Dilution series were mixed with either (for DNA) BioRad's Supermix for Probes (no dUTP) or with (for RNA) BioRad's One-Step RT-ddPCR Advanced Kit for Probes and the corresponding qPCR probe for the target sequence. The QX200 droplet generator (BioRad) was used to generate droplets; after transferring to a droplet digital PCR plate (BioRad), thermal cycling was carried out with conditions as described in the BioRad protocol (with the exception of the Ea175 target, for which the annealing temperature was lowered according to the lower melting temperature of the primer set). Concentrations were measured using a QX200 droplet reader (Rare Event Detection, RED).

### Analysis of SHERLOCK Fluorescence Data

[0323] Fluorescent measurements were analyzed as described previously^{1,2}. Background subtracted fluorescence was calculated by subtracting the initial measured fluorescence. All reactions were run with at least three technical replicates and a control condition containing no target input.

### Analysis of Lateral Flow Results

[0324] Acquired images were converted to 8-bit grayscale using photoshop and then imported into ImageLab software (BioRad Image Lab Software 6.0.1). Images were inverted and lanes were manually adjusted to fit the lateral flow strips. Bands were picked automatically and the background was adjusted manually to allow band comparison. Width of bands and background adjustment was kept constant between all bands in the same image.

Predictive Model of Cas13 crRNA Activity

[0325] Guide activity values from the Cas13 detection tiling experiments were pre-processed by background subtracting the zero time-point fluorescence from the terminal fluorescence value. On a per-target basis, these values were further normalized to the max or median value or used as raw fluorescence values. Training was performed using a series of thresholds to classify guides into two classes (good or bad) and the best threshold was selected based on model performance. Separately, performance was also compared to separating guides into two classes based on being in the top quintile per target (good guides). For each protein (LwaCas13a or CcaCas13b), the best guide classification method was selected based on model performance.

[0326] To generate features for each guide, one-hot encoding was used to represent mono-nucleotide and di-nucleotide base identities across the guide and flanking sequence in the target. The flanking sequence length was an additional variable that was determined by measuring model performance across different flanking sequence lengths. Additional features used were normalized positions of the guide in the target and the GC content of the guide.

[0327] Logistic regressions were tested across the variable guide classification methods, flanking sequence lengths, logistic regulation tuning parameters, and regularization methods (L1 and L2). Training was performed by separating the training set into three smaller sets for training, testing, and validation. After performing three-fold cross validation on the train and test sets, a final validation of the best model was used to generate AUC curves and assay final model performance. The best performing models were then selected for the LwaCas13a and CcaCas13b datasets.

### In Vivo Knockdown Experiments

[0328] To evaluate the in vivo predictive performance of the LwaCas13a guide design model, we tested guide knockdown in mammalian cell culture. Knockdown experiments were performed in HEK293FT cells (American Type Culture Collection (ATCC)), which were grown in Dulbecco's Modified Eagle Medium with high glucose, sodium pyruvate, and GlutaMAX (Thermo Fisher Scientific), additionally supplemented with 1× penicillin-streptomycin (Thermo Fisher Scientific) and 10% fetal bovine serum (VWR Seradigm). Twenty-four hours prior to transfection, cells were plated at 20,000 cells per well in 96-well poly-D-lysine plates (BD Biocoat). When cells reached ˜90% confluency, 150 ng of LwaCas13 plasmid, 300 ng of guide expression plasmid, and 40 ng of luciferase reporter plasmid were transfected using Lipofectamine 2000 (Thermo Fisher Scientific). Plasmids were combined in Opti-MEM I Reduced Serum Medium (Thermo Fisher) to a total of 25 μL and added to 25 μL of a 2% Lipofectamine 2000 mixture in Opti-MEM. After incubation for 10 minutes, the plasmid Lipofectamine solutions were added to cells. At 48 hours post transfection, supernatant was harvested to measure secreted Gaussia luciferase and Cypridina luciferase levels using assay kits (Targeting Systems) on a plate reader (Biotek Synergy Neo 2) with an injection protocol. All replicates performed are biological replicates.

Sample Collection and Acquisition from Patients with PML-RARa and BCR-ABL Fusions

[0329] Cryopreserved bone marrow samples were obtained from the Pasquerello Tissue Bank at the Dana-Farber Cancer Institute following database query for samples harboring the PML-RARa and BCR-ABL fusion transcripts. Fresh peripheral blood and bone marrow aspirate was also obtained from 3 newly diagnosed patients (samples 1, 12, 15). All patients from whom samples were obtained had consented to the institutional tissue banking IRB protocol.

Extraction of RNA from Patient Samples with PML-RARa and BCR-ABL Fusions

[0330] Cryopreserved samples were washed with PBS and pelleted. Fresh samples (samples 1, 12, 15) collected in EDTA tubes were first treated with RBC Lysis Buffer (BD Pharmlyse) followed by PBS washes and then pelleted. RNA was then extracted using the Qiagen RNeasy Kit.

### RT-PCR Validation of PML-RARa and BCR-ABL Transcripts

[0331] cDNA was generated from 0.2-lug of RNA per sample using the Qiagen Quantitect Reverse Transcription kit. Nested PCR was performed using the previously validated, target specific primers and protocol described in van Dongen et al.²⁸. PCR products were visualized on a 2.5% agarose gel, shown in FIG. 18A-18D. Expected Band Sizes with nested primer sets: PML-RARa Intron 6 (214 bp); PML-RARa Intron 3 (289 bp); BCR-ABL p210 e14a2 (360 bp); BCR-ABL p210 e13a2 (285 bp); BCR-ABL p190 (e1a2: 381 bp). Note that samples with exon 6 breakpoint will have variable size bands depending on the position of breakpoint: for example, multiple bands are present in samples 4-6 (FIG. 19A-19E). GAPDH was run as a control (FIG. 19A-19E) with an expected band size of 138 bp.

Design of crRNA Targeting APML and BCR-ABL Fusion Transcripts with SHERLOCK Guide Model

[0332] Best and worst guides were predicted using the guide design web tool (sherlock.genome-engineering.org) for LwaCas13a and CcaCas13b guide design published in this study. For validation of the guide design tool, crRNAs tiling along the fusion transcript were also synthesized and tested for collateral activity (data reported in FIGS. 13A-13E, 17A-17C, and 20). The best predicted guides were used in detection of PML-RARa and BCR-ABL fusion transcripts in SHERLOCK detection assays described below.

Detection of APML and BCR-ABL Clinical RNA Samples with SHERLOCK

[0333] Two-step SHERLOCK assays were performed as previously described with slight modifications to the RPA protocol^{1,2}. In brief, basic RPA reactions were performed with the TwistAmp® Basic (TwistDx) protocol modified to perform RT-RPA with the following changes: 10 units/uL of AMV-RT was added after resuspension of pellet and addition of primers, following which 280 mM MgAc was added, all prior to input DNA. RT-RPA reactions at a total volume of 11 uL were run with 1 μL of input RNA for 45 minutes at 42° C. RT-RPA reactions for each fusion transcript were performed with all primer sets for all three transcripts detected in this study (PML-RARa Intron/Exon 6; PML-RARa Intron 3; BCR-ABL p210 b3a2).

[0334] Cas13 detection reactions were performed as described above with LwaCas13a and the best guide determined with the machine learning model, with the exception that reactions with a final volume of 20 uL contained 0.5 uL of input from RPA reactions. Reactions were supplemented with either RNAse Alert v2 (Invitrogen) for fluorescent readout, or a FAM-RNA-biotin reporter for lateral flow readout; reactions were incubated and quantified as described above respectively.

[0335] The initial set of samples (samples 1-11, 13-14, 16-19) were blinded for both steps of SHERLOCK detection; samples 12 and 15 were run as separate experiments as new patient samples became available. Data for both fluorescence and lateral flow were normalized to make the combined figures shown in FIG. 15A-15F by subtracting the readout of a control reaction (RPA reaction with water input) for each experiment to include both blinded and non-blinded samples.

[0336] Two-pot SHERLOCK-RPA multiplexed lateral flow reactions were carried out as described above, with the exception reporter concentrations were lowered to a final concentration of 1 uM LwaCas13a reporter and 250 nM CcaCas13b reporter (see Table 5 for all reporters). 20 μL reactions were suspended in 100 μL of HybriDetect 1 assay buffer (Milenia) and run on custom multiplexed strips (DCN Diagnostics), and were visualized and quantified as described above.

[0337] Various modifications and variations of the described methods, pharmaceutical compositions, and kits of the invention will be apparent to those skilled in the art without departing from the scope and spirit of the invention. Although the invention has been described in connection with specific embodiments, it will be understood that it is capable of further modifications and that the invention as claimed should not be unduly limited to such specific embodiments. Indeed, various modifications of the described modes for carrying out the invention that are obvious to those skilled in the art are intended to be within the scope of the invention. This application is intended to cover any variations, uses, or adaptations of the invention following, in general, the principles of the invention and including such departures from the present disclosure come within known customary practice within the art to which the invention pertains and may be applied to the essential features herein before set forth.

The application's sequence listing, which the Patent Office published only in electronic form, follows.

SEQUENCE LISTING (3346 sequences)

SEQ ID NO: 1 - protein, 29 aa, Artificial Sequence
  Synthetic
  misc_feature (17)..(17): Xaa can be any naturally occurring amino acid
ILAYLRLIANPDDDISXKRIINVPKRGIG

SEQ ID NO: 2 - protein, 29 aa, Thermoanaerobacter tengcongensis
ILAYLRLIVNPYDDISFKRIVNVPRRGIG

SEQ ID NO: 3 - protein, 29 aa, Thermoanaerobacter ethanolicus
IIAYLRILVNPYDDISFKRIINVPKRGIG

SEQ ID NO: 4 - protein, 29 aa, Bacillus sp.
LLAYLRLIANPADDISLQRIINVPKRGLG

SEQ ID NO: 5 - protein, 29 aa, Bacillus megaterium
LLAYLRLIANQDDDISLARIVNVPKRGVG

SEQ ID NO: 6 - protein, 29 aa, Bacillus simplex
LLAYLRLIANPDDDISLRRVINVPKRGIG

SEQ ID NO: 7 - protein, 29 aa, Paeniclostridium sordellii
LVAYLRVLQNVQDDISLKRIINVPKRGIG

SEQ ID NO: 8 - RNA, 25 nt, Homo sapiens
gggaacaaagcugaaguacuuaccc

SEQ ID NO: 9 - DNA, 18 bp, Homo sapiens
gggtagggcgggttggga

SEQ ID NO: 10 - RNA, 12 nt, Artificial Sequence
  Synthetic
  misc_feature (1)..(1): Biotin Tag - /5Biosyg/
  misc_feature (12)..(12): Iowa black quencher - /3IAbRQSp
ucucguacguuc

SEQ ID NO: 11 - RNA, 24 nt, Artificial Sequence
  Synthetic
  misc_feature (1)..(1): Biotin Tag - /5Biosyg/
  misc_feature (24)..(24): Iowa Black Quencher -/3IAbRQSp/
ucucguacguucucucguacguuc

SEQ ID NO: 12 - DNA, 64 bp, Artificial Sequence
  Synthetic
gatttagactaccccaaaaacgaaggggactaaaacttgagaggttggcccctgaatatgtact

SEQ ID NO: 13 - DNA, 64 bp, Artificial Sequence
  Synthetic
gatttagactaccccaaaaacgaaggggactaaaacgttgagaggttggcccctgaatatgtac

SEQ ID NO: 14 - DNA, 64 bp, Artificial Sequence
  Synthetic
gatttagactaccccaaaaacgaaggggactaaaactgttgagaggttggcccctgaatatgta

SEQ ID NO: 15 - DNA, 64 bp, Artificial Sequence
  Synthetic
gatttagactaccccaaaaacgaaggggactaaaacttgttgagaggttggcccctgaatatgt

SEQ ID NO: 16 - DNA, 64 bp, Artificial Sequence
  Synthetic
gatttagactaccccaaaaacgaaggggactaaaacattgttgagaggttggcccctgaatatg

SEQ ID NO: 17 - DNA, 64 bp, Artificial Sequence
  Synthetic
gatttagactaccccaaaaacgaaggggactaaaaccattgttgagaggttggcccctgaatat

SEQ ID NO: 18 - DNA, 64 bp, Artificial Sequence
  Synthetic
gatttagactaccccaaaaacgaaggggactaaaactcattgttgagaggttggcccctgaata

SEQ ID NO: 19 - DNA, 64 bp, Artificial Sequence
  Synthetic
gatttagactaccccaaaaacgaaggggactaaaacgtcattgttgagaggttggcccctgaat

SEQ ID NO: 20 - DNA, 64 bp, Artificial Sequence
  Synthetic
gatttagactaccccaaaaacgaaggggactaaaaccgtcattgttgagaggttggcccctgaa

SEQ ID NO: 21 - DNA, 64 bp, Artificial Sequence
  Synthetic
gatttagactaccccaaaaacgaaggggactaaaactcgtcattgttgagaggttggcccctga

SEQ ID NO: 22 - DNA, 64 bp, Artificial Sequence
  Synthetic
gatttagactaccccaaaaacgaaggggactaaaacttcgtcattgttgagaggttggcccctg

SEQ ID NO: 23 - DNA, 64 bp, Artificial Sequence
  Synthetic
gatttagactaccccaaaaacgaaggggactaaaaccttcgtcattgttgagaggttggcccct

SEQ ID NO: 24 - DNA, 64 bp, Artificial Sequence
  Synthetic
gatttagactaccccaaaaacgaaggggactaaaactcttcgtcattgttgagaggttggcccc

SEQ ID NO: 25 - DNA, 64 bp, Artificial Sequence
  Synthetic
gatttagactaccccaaaaacgaaggggactaaaacgtcttcgtcattgttgagaggttggccc

SEQ ID NO: 26 - DNA, 64 bp, Artificial Sequence
  Synthetic
gatttagactaccccaaaaacgaaggggactaaaacggtcttcgtcattgttgagaggttggcc

SEQ ID NO: 27 - DNA, 64 bp, Artificial Sequence
  Synthetic
gatttagactaccccaaaaacgaaggggactaaaactggtcttcgtcattgttgagaggttggc

SEQ ID NO: 28 - DNA, 64 bp, Artificial Sequence
  Synthetic
gatttagactaccccaaaaacgaaggggactaaaacatggtcttcgtcattgttgagaggttgg

SEQ ID NO: 29 - DNA, 64 bp, Artificial Sequence
  Synthetic
gatttagactaccccaaaaacgaaggggactaaaaccatggtcttcgtcattgttgagaggttg

SEQ ID NO: 30 - DNA, 64 bp, Artificial Sequence
  Synthetic
gatttagactaccccaaaaacgaaggggactaaaacgcatggtcttcgtcattgttgagaggtt

SEQ ID NO: 31 - DNA, 64 bp, Artificial Sequence
  Synthetic
gatttagactaccccaaaaacgaaggggactaaaacagcatggtcttcgtcattgttgagaggt

SEQ ID NO: 32 - DNA, 64 bp, Artificial Sequence
  Synthetic
gatttagactaccccaaaaacgaaggggactaaaactgagcatggtcttcgtcattgttgagag

SEQ ID NO: 33 - DNA, 64 bp, Artificial Sequence
  Synthetic
gatttagactaccccaaaaacgaaggggactaaaacagtgagcatggtcttcgtcattgttgag

SEQ ID NO: 34 - DNA, 64 bp, Artificial Sequence
  Synthetic
gatttagactaccccaaaaacgaaggggactaaaacccagtgagcatggtcttcgtcattgttg

SEQ ID NO: 35 - DNA, 64 bp, Artificial Sequence
  Synthetic
gatttagactaccccaaaaacgaaggggactaaaacgtccagtgagcatggtcttcgtcattgt

SEQ ID NO: 36 - DNA, 64 bp, Artificial Sequence
  Synthetic
gatttagactaccccaaaaacgaaggggactaaaacctgtccagtgagcatggtcttcgtcatt

SEQ ID NO: 37 - DNA, 64 bp, Artificial Sequence
  Synthetic
gatttagactaccccaaaaacgaaggggactaaaacttctgtccagtgagcatggtcttcgtca

SEQ ID NO: 38 - DNA, 64 bp, Artificial Sequence
  Synthetic
gatttagactaccccaaaaacgaaggggactaaaacgcttctgtccagtgagcatggtcttcgt

SEQ ID NO: 39 - DNA, 64 bp, Artificial Sequence
  Synthetic
gatttagactaccccaaaaacgaaggggactaaaacttgcttctgtccagtgagcatggtcttc

SEQ ID NO: 40 - DNA, 64 bp, Artificial Sequence
  Synthetic
gatttagactaccccaaaaacgaaggggactaaaacttttgcttctgtccagtgagcatggtct

SEQ ID NO: 41 - DNA, 64 bp, Artificial Sequence
  Synthetic
gatttagactaccccaaaaacgaaggggactaaaacatttttgcttctgtccagtgagcatggt

SEQ ID NO: 42 - DNA, 64 bp, Artificial Sequence
  Synthetic
gatttagactaccccaaaaacgaaggggactaaaacgcatttttgcttctgtccagtgagcatg

SEQ ID NO: 43 - DNA, 64 bp, Artificial Sequence
  Synthetic
gatttagactaccccaaaaacgaaggggactaaaaccagcatttttgcttctgtccagtgagca

SEQ ID NO: 44 - DNA, 64 bp, Artificial Sequence
  Synthetic
gatttagactaccccaaaaacgaaggggactaaaacagcagcatttttgcttctgtccagtgag

SEQ ID NO: 45 - DNA, 64 bp, Artificial Sequence
  Synthetic
gatttagactaccccaaaaacgaaggggactaaaacccagcagcatttttgcttctgtccagtg

SEQ ID NO: 46 - DNA, 64 bp, Artificial Sequence
  Synthetic
gatttagactaccccaaaaacgaaggggactaaaacgtccagcagcatttttgcttctgtccag

SEQ ID NO: 47 - DNA, 64 bp, Artificial Sequence
  Synthetic
gatttagactaccccaaaaacgaaggggactaaaacttgtccagcagcatttttgcttctgtcc

SEQ ID NO: 48 - DNA, 64 bp, Artificial Sequence
  Synthetic
gatttagactaccccaaaaacgaaggggactaaaactgttgtccagcagcatttttgcttctgt

SEQ ID NO: 49 - DNA, 64 bp, Artificial Sequence
  Synthetic
gatttagactaccccaaaaacgaaggggactaaaacgatgttgtccagcagcatttttgcttct

SEQ ID NO: 50 - DNA, 64 bp, Artificial Sequence
  Synthetic
gatttagactaccccaaaaacgaaggggactaaaacttgatgttgtccagcagcatttttgctt

SEQ ID NO: 51 - DNA, 64 bp, Artificial Sequence
  Synthetic
gatttagactaccccaaaaacgaaggggactaaaactgttgatgttgtccagcagcatttttgc

SEQ ID NO: 52 - DNA, 64 bp, Artificial Sequence
  Synthetic
gatttagactaccccaaaaacgaaggggactaaaactgtgttgatgttgtccagcagcattttt

SEQ ID NO: 53 - DNA, 64 bp, Artificial Sequence
  Synthetic
gatttagactaccccaaaaacgaaggggactaaaacggtgtgttgatgttgtccagcagcattt

SEQ ID NO: 54 - DNA, 64 bp, Artificial Sequence
  Synthetic
gatttagactaccccaaaaacgaaggggactaaaacctggtgtgttgatgttgtccagcagcat

SEQ ID NO: 55 - DNA, 64 bp, Artificial Sequence
  Synthetic
gatttagactaccccaaaaacgaaggggactaaaacttctggtgtgttgatgttgtccagcagc

SEQ ID NO: 56 - DNA, 64 bp, Artificial Sequence
  Synthetic
gatttagactaccccaaaaacgaaggggactaaaacccttctggtgtgttgatgttgtccagca

SEQ ID NO: 57 - DNA, 64 bp, Artificial Sequence
  Synthetic
gatttagactaccccaaaaacgaaggggactaaaactcccttctggtgtgttgatgttgtccag

SEQ ID NO: 58 - DNA, 64 bp, Artificial Sequence
  Synthetic
gatttagactaccccaaaaacgaaggggactaaaacaatcccttctggtgtgttgatgttgtcc

SEQ ID NO: 59 - DNA, 64 bp, Artificial Sequence
  Synthetic
gatttagactaccccaaaaacgaaggggactaaaacataatcccttctggtgtgttgatgttgt

SEQ ID NO: 60 - DNA, 64 bp, Artificial Sequence
  Synthetic
gatttagactaccccaaaaacgaaggggactaaaacgtataatcccttctggtgtgttgatgtt

SEQ ID NO: 61 - DNA, 64 bp, Artificial Sequence
  Synthetic
gatttagactaccccaaaaacgaaggggactaaaactggtataatcccttctggtgtgttgatg

SEQ ID NO: 62 - DNA, 64 bp, Artificial Sequence
  Synthetic
gatttagactaccccaaaaacgaaggggactaaaacgctggtataatcccttctggtgtgttga

SEQ ID NO: 63 - DNA, 64 bp, Artificial Sequence
  Synthetic
gatttagactaccccaaaaacgaaggggactaaaacgagctggtataatcccttctggtgtgtt

SEQ ID NO: 64 - DNA, 64 bp, Artificial Sequence
  Synthetic
gatttagactaccccaaaaacgaaggggactaaaacgagagctggtataatcccttctggtgtg

SEQ ID NO: 65 - DNA, 64 bp, Artificial Sequence
  Synthetic
gatttagactaccccaaaaacgaaggggactaaaacaagagagctggtataatcccttctggtg

SEQ ID NO: 66 - DNA, 64 bp, Artificial Sequence
  Synthetic
gatttagactaccccaaaaacgaaggggactaaaaccaaagagagctggtataatcccttctgg

SEQ ID NO: 67 - DNA, 64 bp, Artificial Sequence
  Synthetic
gatttagactaccccaaaaacgaaggggactaaaacttcaaagagagctggtataatcccttct

SEQ ID NO: 68 - DNA, 64 bp, Artificial Sequence
  Synthetic
gatttagactaccccaaaaacgaaggggactaaaacggttcaaagagagctggtataatccctt

SEQ ID NO: 69 - DNA, 64 bp, Artificial Sequence
  Synthetic
gatttagactaccccaaaaacgaaggggactaaaacctggttcaaagagagctggtataatccc

SEQ ID NO: 70 - DNA, 64 bp, Artificial Sequence
  Synthetic
gatttagactaccccaaaaacgaaggggactaaaacttctggttcaaagagagctggtataatc

SEQ ID NO: 71 - DNA, 64 bp, Artificial Sequence
  Synthetic
gatttagactaccccaaaaacgaaggggactaaaacctttctggttcaaagagagctggtataa

SEQ ID NO: 72 - DNA, 64 bp, Artificial Sequence
  Synthetic
gatttagactaccccaaaaacgaaggggactaaaacccctttctggttcaaagagagctggtat

SEQ ID NO: 73 - DNA, 64 bp, Artificial Sequence
  Synthetic
gatttagactaccccaaaaacgaaggggactaaaacctccctttctggttcaaagagagctggt

SEQ ID NO: 74 - DNA, 64 bp, Artificial Sequence
  Synthetic
gatttagactaccccaaaaacgaaggggactaaaacttctccctttctggttcaaagagagctg

SEQ ID NO: 75 - DNA, 64 bp, Artificial Sequence
  Synthetic
gatttagactaccccaaaaacgaaggggactaaaacacttctccctttctggttcaaagagagc

SEQ ID NO: 76 - DNA, 64 bp, Artificial Sequence
  Synthetic
gatttagactaccccaaaaacgaaggggactaaaactgacttctccctttctggttcaaagaga

SEQ ID NO: 77 - DNA, 64 bp, Artificial Sequence
  Synthetic
gatttagactaccccaaaaacgaaggggactaaaacctgacttctccctttctggttcaaagag

SEQ ID NO: 78 - DNA, 64 bp, Artificial Sequence
  Synthetic
gatttagactaccccaaaaacgaaggggactaaaacgctgacttctccctttctggttcaaaga

SEQ ID NO: 79 - DNA, 64 bp, Artificial Sequence
  Synthetic
gatttagactaccccaaaaacgaaggggactaaaacggctgacttctccctttctggttcaaag

SEQ ID NO: 80 - DNA, 64 bp, Artificial Sequence
  Synthetic
gatttagactaccccaaaaacgaaggggactaaaaccggctgacttctccctttctggttcaaa

SEQ ID NO: 81 - DNA, 64 bp, Artificial Sequence
  Synthetic
gatttagactaccccaaaaacgaaggggactaaaacgcggctgacttctccctttctggttcaa

SEQ ID NO: 82 - DNA, 64 bp, Artificial Sequence
  Synthetic
gatttagactaccccaaaaacgaaggggactaaaacggcggctgacttctccctttctggttca

SEQ ID NO: 83 - DNA, 64 bp, Artificial Sequence
  Synthetic
gatttagactaccccaaaaacgaaggggactaaaactggcggctgacttctccctttctggttc

SEQ ID NO: 84 - DNA, 64 bp, Artificial Sequence
  Synthetic
gatttagactaccccaaaaacgaaggggactaaaacatggcggctgacttctccctttctggtt

SEQ ID NO: 85 - DNA, 64 bp, Artificial Sequence
  Synthetic
gatttagactaccccaaaaacgaaggggactaaaactatggcggctgacttctccctttctggt

SEQ ID NO: 86 - DNA, 64 bp, Artificial Sequence
  Synthetic
gatttagactaccccaaaaacgaaggggactaaaacctatggcggctgacttctccctttctgg

SEQ ID NO: 87 - DNA, 64 bp, Artificial Sequence
  Synthetic
gatttagactaccccaaaaacgaaggggactaaaactctatggcggctgacttctccctttctg

SEQ ID NO: 88 - DNA, 64 bp, Artificial Sequence
  Synthetic
gatttagactaccccaaaaacgaaggggactaaaacgtctatggcggctgacttctccctttct

SEQ ID NO: 89 - DNA, 64 bp, Artificial Sequence
  Synthetic
gatttagactaccccaaaaacgaaggggactaaaaccgtctatggcggctgacttctccctttc

SEQ ID NO: 90 - DNA, 64 bp, Artificial Sequence
  Synthetic
gatttagactaccccaaaaacgaaggggactaaaacccgtctatggcggctgacttctcccttt

SEQ ID NO: 91 - DNA, 64 bp, Artificial Sequence
  Synthetic
gatttagactaccccaaaaacgaaggggactaaaacaccgtctatggcggctgacttctccctt

SEQ ID NO: 92 - DNA, 64 bp, Artificial Sequence
  Synthetic
gatttagactaccccaaaaacgaaggggactaaaaccaccgtctatggcggctgacttctccct

SEQ ID NO: 93 - DNA, 64 bp, Artificial Sequence
  Synthetic
gatttagactaccccaaaaacgaaggggactaaaactcaccgtctatggcggctgacttctccc

SEQ ID NO: 94 - DNA, 64 bp, Artificial Sequence
  Synthetic
gatttagactaccccaaaaacgaaggggactaaaacttcaccgtctatggcggctgacttctcc

SEQ ID NO: 95 - DNA, 64 bp, Artificial Sequence
  Synthetic
gatttagactaccccaaaaacgaaggggactaaaacattcaccgtctatggcggctgacttctc

SEQ ID NO: 96 - DNA, 64 bp, Artificial Sequence
  Synthetic
gatttagactaccccaaaaacgaaggggactaaaactattcaccgtctatggcggctgacttct

SEQ ID NO: 97 - DNA, 64 bp, Artificial Sequence
  Synthetic
gatttagactaccccaaaaacgaaggggactaaaacgtattcaccgtctatggcggctgacttc

SEQ ID NO: 98 - DNA, 64 bp, Artificial Sequence
  Synthetic
gatttagactaccccaaaaacgaaggggactaaaacggtattcaccgtctatggcggctgactt

SEQ ID NO: 99 - DNA, 64 bp, Artificial Sequence
  Synthetic
gatttagactaccccaaaaacgaaggggactaaaaccggtattcaccgtctatggcggctgact

SEQ ID NO: 100 - DNA, 64 bp, Artificial Sequence
  Synthetic
gatttagactaccccaaaaacgaaggggactaaaacgcggtattcaccgtctatggcggctgac

SEQ ID NO: 101 - DNA, 64 bp, Artificial Sequence
  Synthetic
gatttagactaccccaaaaacgaaggggactaaaacggcggtattcaccgtctatggcggctga

SEQ ID NO: 102 - DNA, 64 bp, Artificial Sequence
  Synthetic
gatttagactaccccaaaaacgaaggggactaaaacaggcggtattcaccgtctatggcggctg

SEQ ID NO: 103 - DNA, 64 bp, Artificial Sequence
  Synthetic
gatttagactaccccaaaaacgaaggggactaaaaccaggcggtattcaccgtctatggcggct

SEQ ID NO: 104 - DNA, 64 bp, Artificial Sequence
  Synthetic
gatttagactaccccaaaaacgaaggggactaaaactcaggcggtattcaccgtctatggcggc

SEQ ID NO: 105 - DNA, 64 bp, Artificial Sequence
  Synthetic
gatttagactaccccaaaaacgaaggggactaaaacttcaggcggtattcaccgtctatggcgg

SEQ ID NO: 106 - DNA, 64 bp, Artificial Sequence
  Synthetic
gatttagactaccccaaaaacgaaggggactaaaaccttcaggcggtattcaccgtctatggcg

SEQ ID NO: 107 - DNA, 64 bp, Artificial Sequence
  Synthetic
gatttagactaccccaaaaacgaaggggactaaaacccttcaggcggtattcaccgtctatggc

SEQ ID NO: 108 - DNA, 64 bp, Artificial Sequence
  Synthetic
gatttagactaccccaaaaacgaaggggactaaaacctgtgaaagacaactcttcactgcgaat

SEQ ID NO: 109 - DNA, 64 bp, Artificial Sequence
  Synthetic
gatttagactaccccaaaaacgaaggggactaaaacgatacaactgtgaaagacaactcttcac

SEQ ID NO: 110 - DNA, 64 bp, Artificial Sequence
  Synthetic
gatttagactaccccaaaaacgaaggggactaaaactgatacaactgtgaaagacaactcttca

SEQ ID NO: 111 - DNA, 64 bp, Artificial Sequence
  Synthetic
gatttagactaccccaaaaacgaaggggactaaaactttgatacaactgtgaaagacaactctt

SEQ ID NO: 112 - DNA, 64 bp, Artificial Sequence
  Synthetic
gatttagactaccccaaaaacgaaggggactaaaactccgtttgatacaactgtgaaagacaac

SEQ ID NO: 113 - DNA, 64 bp, Artificial Sequence
  Synthetic
gatttagactaccccaaaaacgaaggggactaaaacggctccgtttgatacaactgtgaaagac

SEQ ID NO: 114 - DNA, 64 bp, Artificial Sequence
  Synthetic
gatttagactaccccaaaaacgaaggggactaaaacccactgatgtttttggctccgtttgata

SEQ ID NO: 115 - DNA, 64 bp, Artificial Sequence
  Synthetic
gatttagactaccccaaaaacgaaggggactaaaacaccactgatgtttttggctccgtttgat

SEQ ID NO: 116 - DNA, 64 bp, Artificial Sequence
  Synthetic
gatttagactaccccaaaaacgaaggggactaaaacgaccactgatgtttttggctccgtttga

SEQ ID NO: 117 - DNA, 64 bp, Artificial Sequence
  Synthetic
gatttagactaccccaaaaacgaaggggactaaaacctgaccactgatgtttttggctccgttt

SEQ ID NO: 118 - DNA, 64 bp, Artificial Sequence
  Synthetic
gatttagactaccccaaaaacgaaggggactaaaacctctgaccactgatgtttttggctccgt

SEQ ID NO: 119 - DNA, 64 bp, Artificial Sequence
  Synthetic
gatttagactaccccaaaaacgaaggggactaaaaccgccggactctgaccactgatgtttttg

SEQ ID NO: 120 - DNA, 64 bp, Artificial Sequence
  Synthetic
gatttagactaccccaaaaacgaaggggactaaaaccgcgccggactctgaccactgatgtttt

SEQ ID NO: 121 - DNA, 64 bp, Artificial Sequence
  Synthetic
gatttagactaccccaaaaacgaaggggactaaaacttcgcgccggactctgaccactgatgtt

SEQ ID NO: 122 - DNA, 64 bp, Artificial Sequence
  Synthetic
gatttagactaccccaaaaacgaaggggactaaaacgttcgcgccggactctgaccactgatgt

SEQ ID NO: 123 - DNA, 64 bp, Artificial Sequence
  Synthetic
gatttagactaccccaaaaacgaaggggactaaaacagttcgcgccggactctgaccactgatg

SEQ ID NO: 124 - DNA, 64 bp, Artificial Sequence
  Synthetic
gatttagactaccccaaaaacgaaggggactaaaacaagttcgcgccggactctgaccactgat

SEQ ID NO: 125 - DNA, 64 bp, Artificial Sequence
  Synthetic
gatttagactaccccaaaaacgaaggggactaaaacagaagttcgcgccggactctgaccactg

SEQ ID NO: 126 - DNA, 64 bp, Artificial Sequence
  Synthetic
gatttagactaccccaaaaacgaaggggactaaaacggtcggaagaagttcgcgccggactctg

SEQ ID NO: 127 - DNA, 64 bp, Artificial Sequence
  Synthetic
gatttagactaccccaaaaacgaaggggactaaaacctgggtcggaagaagttcgcgccggact

SEQ ID NO: 128 - DNA, 64 bp, Artificial Sequence
  Synthetic
gatttagactaccccaaaaacgaaggggactaaaaccctgggtcggaagaagttcgcgccggac

SEQ ID NO: 129 - DNA, 64 bp, Artificial Sequence
  Synthetic
gatttagactaccccaaaaacgaaggggactaaaacccctgggtcggaagaagttcgcgccgga

SEQ ID NO: 130 - DNA, 64 bp, Artificial Sequence
  Synthetic
gatttagactaccccaaaaacgaaggggactaaaactccctgggtcggaagaagttcgcgccgg

SEQ ID NO: 131 - DNA, 64 bp, Artificial Sequence
  Synthetic
gatttagactaccccaaaaacgaaggggactaaaacggtccctgggtcggaagaagttcgcgcc

SEQ ID NO: 132 - DNA, 64 bp, Artificial Sequence
  Synthetic
gatttagactaccccaaaaacgaaggggactaaaacgttggtccctgggtcggaagaagttcgc

SEQ ID NO: 133 - DNA, 64 bp, Artificial Sequence
  Synthetic
gatttagactaccccaaaaacgaaggggactaaaacagttgttgtgttggtccctgggtcggaa

SEQ ID NO: 134 - DNA, 64 bp, Artificial Sequence
  Synthetic
gatttagactaccccaaaaacgaaggggactaaaactcagttgttgtgttggtccctgggtcgg

SEQ ID NO: 135 - DNA, 64 bp, Artificial Sequence
  Synthetic
gatttagactaccccaaaaacgaaggggactaaaacttcagttgttgtgttggtccctgggtcg

SEQ ID NO: 136 - DNA, 64 bp, Artificial Sequence
  Synthetic
gatttagactaccccaaaaacgaaggggactaaaaccttcagttgttgtgttggtccctgggtc

SEQ ID NO: 137 - DNA, 64 bp, Artificial Sequence
  Synthetic
gatttagactaccccaaaaacgaaggggactaaaactcttcagttgttgtgttggtccctgggt

SEQ ID NO: 138 - DNA, 64 bp, Artificial Sequence
  Synthetic
gatttagactaccccaaaaacgaaggggactaaaactggtcttcagttgttgtgttggtccctg

SEQ ID NO: 139 - DNA, 64 bp, Artificial Sequence
  Synthetic
gatttagactaccccaaaaacgaaggggactaaaacattttgtggtcttcagttgttgtgttgg

SEQ ID NO: 140 - DNA, 64 bp, Artificial Sequence
  Synthetic
gatttagactaccccaaaaacgaaggggactaaaacgccatgattttgtggtcttcagttgttg

SEQ ID NO: 141 - DNA, 64 bp, Artificial Sequence
  Synthetic
gatttagactaccccaaaaacgaaggggactaaaacaagccatgattttgtggtcttcagttgt

SEQ ID NO: 142 - DNA, 64 bp, Artificial Sequence
  Synthetic
gatttagactaccccaaaaacgaaggggactaaaacctgaagccatgattttgtggtcttcagt

SEQ ID NO: 143 - DNA, 64 bp, Artificial Sequence
  Synthetic
gatttagactaccccaaaaacgaaggggactaaaacgaattttctgaagccatgattttgtggt

SEQ ID NO: 144 - DNA, 64 bp, Artificial Sequence
  Synthetic
gatttagactaccccaaaaacgaaggggactaaaacagaggaattttctgaagccatgattttg

SEQ ID NO: 145 - DNA, 64 bp, Artificial Sequence
  Synthetic
gatttagactaccccaaaaacgaaggggactaaaaccagaggaattttctgaagccatgatttt

SEQ ID NO: 146 - DNA, 64 bp, Artificial Sequence
  Synthetic
gatttagactaccccaaaaacgaaggggactaaaaccattgcagaggaattttctgaagccatg

SEQ ID NO: 147 - DNA, 64 bp, Artificial Sequence
  Synthetic
gatttagactaccccaaaaacgaaggggactaaaaccacttgaaccattgcagaggaattttct

SEQ ID NO: 148 - DNA, 64 bp, Artificial Sequence
  Synthetic
gatttagactaccccaaaaacgaaggggactaaaacccccgggtaccgagctcgaattcactgg

SEQ ID NO: 149 - DNA, 64 bp, Artificial Sequence
  Synthetic
gatttagactaccccaaaaacgaaggggactaaaactccccgggtaccgagctcgaattcactg

SEQ ID NO: 150 - DNA, 64 bp, Artificial Sequence
  Synthetic
gatttagactaccccaaaaacgaaggggactaaaacatccccgggtaccgagctcgaattcact

SEQ ID NO: 151 - DNA, 64 bp, Artificial Sequence
  Synthetic
gatttagactaccccaaaaacgaaggggactaaaacaggatccccgggtaccgagctcgaattc

SEQ ID NO: 152 - DNA, 64 bp, Artificial Sequence
  Synthetic
gatttagactaccccaaaaacgaaggggactaaaacagaggatccccgggtaccgagctcgaat

SEQ ID NO: 153 - DNA, 64 bp, Artificial Sequence
  Synthetic
gatttagactaccccaaaaacgaaggggactaaaactctagaggatccccgggtaccgagctcg

SEQ ID NO: 154 - DNA, 64 bp, Artificial Sequence
  Synthetic
gatttagactaccccaaaaacgaaggggactaaaacttctagaggatccccgggtaccgagctc

SEQ ID NO: 155 - DNA, 64 bp, Artificial Sequence
  Synthetic
gatttagactaccccaaaaacgaaggggactaaaacatttctagaggatccccgggtaccgagc

SEQ ID NO: 156 - DNA, 64 bp, Artificial Sequence
  Synthetic
gatttagactaccccaaaaacgaaggggactaaaactatttctagaggatccccgggtaccgag

SEQ ID NO: 157 - DNA, 64 bp, Artificial Sequence
  Synthetic
gatttagactaccccaaaaacgaaggggactaaaacccatatttctagaggatccccgggtacc

SEQ ID NO: 158 - DNA, 64 bp, Artificial Sequence
  Synthetic
gatttagactaccccaaaaacgaaggggactaaaactccatatttctagaggatccccgggtac

SEQ ID NO: 159 - DNA, 64 bp, Artificial Sequence
  Synthetic
gatttagactaccccaaaaacgaaggggactaaaacatccatatttctagaggatccccgggta

SEQ ID NO: 160 - DNA, 64 bp, Artificial Sequence
  Synthetic
gatttagactaccccaaaaacgaaggggactaaaactaatccatatttctagaggatccccggg

SEQ ID NO: 161 - DNA, 64 bp, Artificial Sequence
  Synthetic
gatttagactaccccaaaaacgaaggggactaaaacgtaatccatatttctagaggatccccgg

SEQ ID NO: 162 - DNA, 64 bp, Artificial Sequence
  Synthetic
gatttagactaccccaaaaacgaaggggactaaaactaccaagtaatccatatttctagaggat

SEQ ID NO: 163 - DNA, 64 bp, Artificial Sequence
  Synthetic
gatttagactaccccaaaaacgaaggggactaaaactctaccaagtaatccatatttctagagg

SEQ ID NO: 164 - DNA, 64 bp, Artificial Sequence
  Synthetic
gatttagactaccccaaaaacgaaggggactaaaacgttctaccaagtaatccatatttctaga

SEQ ID NO: 165 - DNA, 64 bp, Artificial Sequence
  Synthetic
gatttagactaccccaaaaacgaaggggactaaaacgctgttctaccaagtaatccatatttct

SEQ ID NO: 166 - DNA, 64 bp, Artificial Sequence
  Synthetic
gatttagactaccccaaaaacgaaggggactaaaacattgctgttctaccaagtaatccatatt

SEQ ID NO: 167 - DNA, 64 bp, Artificial Sequence
  Synthetic
gatttagactaccccaaaaacgaaggggactaaaactagattgctgttctaccaagtaatccat

SEQ ID NO: 168 - DNA, 64 bp, Artificial Sequence
  Synthetic
gatttagactaccccaaaaacgaaggggactaaaacgtagattgctgttctaccaagtaatcca

SEQ ID NO: 169 - DNA, 64 bp, Artificial Sequence
  Synthetic
gatttagactaccccaaaaacgaaggggactaaaacagtagattgctgttctaccaagtaatcc

SEQ ID NO: 170 - DNA, 64 bp, Artificial Sequence
  Synthetic
gatttagactaccccaaaaacgaaggggactaaaacgagtagattgctgttctaccaagtaatc

SEQ ID NO: 171 - DNA, 64 bp, Artificial Sequence
  Synthetic
gatttagactaccccaaaaacgaaggggactaaaactcgagtagattgctgttctaccaagtaa

SEQ ID NO: 172 - DNA, 64 bp, Artificial Sequence
  Synthetic
gatttagactaccccaaaaacgaaggggactaaaacgtcgagtagattgctgttctaccaagta

SEQ ID NO: 173 - DNA, 64 bp, Artificial Sequence
  Synthetic
gatttagactaccccaaaaacgaaggggactaaaaccaggtcgagtagattgctgttctaccaa

SEQ ID NO: 174 - DNA, 64 bp, Artificial Sequence
  Synthetic
gatttagactaccccaaaaacgaaggggactaaaacgcaggtcgagtagattgctgttctacca

SEQ ID NO: 175 - DNA, 64 bp, Artificial Sequence
  Synthetic
gatttagactaccccaaaaacgaaggggactaaaactgcaggtcgagtagattgctgttctacc

SEQ ID NO: 176 - DNA, 64 bp, Artificial Sequence
  Synthetic
gatttagactaccccaaaaacgaaggggactaaaacctgcaggtcgagtagattgctgttctac

SEQ ID NO: 177 - DNA, 64 bp, Artificial Sequence
  Synthetic
gatttagactaccccaaaaacgaaggggactaaaaccctgcaggtcgagtagattgctgttcta

SEQ ID NO: 178 - DNA, 64 bp, Artificial Sequence
  Synthetic
gatttagactaccccaaaaacgaaggggactaaaactgcctgcaggtcgagtagattgctgttc

SEQ ID NO: 179 - DNA, 64 bp, Artificial Sequence
  Synthetic
gatttagactaccccaaaaacgaaggggactaaaacatgcctgcaggtcgagtagattgctgtt

SEQ ID NO: 180 - DNA, 64 bp, Artificial Sequence
  Synthetic
gatttagactaccccaaaaacgaaggggactaaaaccatgcctgcaggtcgagtagattgctgt

SEQ ID NO: 181 - DNA, 64 bp, Artificial Sequence
  Synthetic
gatttagactaccccaaaaacgaaggggactaaaactgcatgcctgcaggtcgagtagattgct

SEQ ID NO: 182 - DNA, 64 bp, Artificial Sequence
  Synthetic
gatttagactaccccaaaaacgaaggggactaaaaccttgcatgcctgcaggtcgagtagattg

SEQ ID NO: 183 - DNA, 64 bp, Artificial Sequence
  Synthetic
gatttagactaccccaaaaacgaaggggactaaaacagcttgcatgcctgcaggtcgagtagat

SEQ ID NO: 184 - DNA, 64 bp, Artificial Sequence
  Synthetic
gatttagactaccccaaaaacgaaggggactaaaaccaagcttgcatgcctgcaggtcgagtag

SEQ ID NO: 185 - DNA, 64 bp, Artificial Sequence
  Synthetic
gatttagactaccccaaaaacgaaggggactaaaacccaagcttgcatgcctgcaggtcgagta

SEQ ID NO: 186 - DNA, 64 bp, Artificial Sequence
  Synthetic
gatttagactaccccaaaaacgaaggggactaaaaccgccaagcttgcatgcctgcaggtcgag

SEQ ID NO: 187 - DNA, 64 bp, Artificial Sequence
  Synthetic
gatttagactaccccaaaaacgaaggggactaaaacacgccaagcttgcatgcctgcaggtcga

SEQ ID NO: 188 - DNA, 64 bp, Artificial Sequence
  Synthetic
gatttagactaccccaaaaacgaaggggactaaaactacgccaagcttgcatgcctgcaggtcg

SEQ ID NO: 189 - DNA, 64 bp, Artificial Sequence
  Synthetic
gatttagactaccccaaaaacgaaggggactaaaacttacgccaagcttgcatgcctgcaggtc

SEQ ID NO: 190 - DNA, 64 bp, Artificial Sequence
  Synthetic
gatttagactaccccaaaaacgaaggggactaaaacattacgccaagcttgcatgcctgcaggt

SEQ ID NO: 191 - DNA, 64 bp, Artificial Sequence
  Synthetic
gatttagactaccccaaaaacgaaggggactaaaacgattacgccaagcttgcatgcctgcagg

SEQ ID NO: 192 - DNA, 64 bp, Artificial Sequence
  Synthetic
gatttagactaccccaaaaacgaaggggactaaaacccatgattacgccaagcttgcatgcctg

SEQ ID NO: 193 - DNA, 64 bp, Artificial Sequence
  Synthetic
gatttagactaccccaaaaacgaaggggactaaaacaccatgattacgccaagcttgcatgcct

SEQ ID NO: 194 - DNA, 64 bp, Artificial Sequence
  Synthetic
gatttagactaccccaaaaacgaaggggactaaaacgaccatgattacgccaagcttgcatgcc

SEQ ID NO: 195 - DNA, 64 bp, Artificial Sequence
  Synthetic
gatttagactaccccaaaaacgaaggggactaaaacatgaccatgattacgccaagcttgcatg

SEQ ID NO: 196 - DNA, 64 bp, Artificial Sequence
  Synthetic
gatttagactaccccaaaaacgaaggggactaaaactatgaccatgattacgccaagcttgcat

SEQ ID NO: 197 - DNA, 64 bp, Artificial Sequence
  Synthetic
gatttagactaccccaaaaacgaaggggactaaaacagctatgaccatgattacgccaagcttg

SEQ ID NO: 198 - DNA, 64 bp, Artificial Sequence
  Synthetic
gatttagactaccccaaaaacgaaggggactaaaaccagctatgaccatgattacgccaagctt

SEQ ID NO: 199 - DNA, 64 bp, Artificial Sequence
  Synthetic
gatttagactaccccaaaaacgaaggggactaaaacacagctatgaccatgattacgccaagct

SEQ ID NO: 200 - DNA, 64 bp, Artificial Sequence
  Synthetic
gatttagactaccccaaaaacgaaggggactaaaacaacagctatgaccatgattacgccaagc

SEQ ID NO: 201 - DNA, 64 bp, Artificial Sequence
  Synthetic
gatttagactaccccaaaaacgaaggggactaaaacaacacaggaaacagctatgaccatgatt

SEQ ID NO: 202 - DNA, 64 bp, Artificial Sequence
  Synthetic
gatttagactaccccaaaaacgaaggggactaaaactaaacacaggaaacagctatgaccatga

SEQ ID NO: 203 - DNA, 64 bp, Artificial Sequence
  Synthetic
gatttagactaccccaaaaacgaaggggactaaaacataaacacaggaaacagctatgaccatg

SEQ ID NO: 204 - DNA, 64 bp, Artificial Sequence
  Synthetic
gatttagactaccccaaaaacgaaggggactaaaacgataaacacaggaaacagctatgaccat

SEQ ID NO: 205 - DNA, 64 bp, Artificial Sequence
  Synthetic
gatttagactaccccaaaaacgaaggggactaaaacggataaacacaggaaacagctatgacca

SEQ ID NO: 206 - DNA, 64 bp, Artificial Sequence
  Synthetic
gatttagactaccccaaaaacgaaggggactaaaaccggataaacacaggaaacagctatgacc

SEQ ID NO: 207 - DNA, 64 bp, Artificial Sequence
  Synthetic
gatttagactaccccaaaaacgaaggggactaaaacgcggataaacacaggaaacagctatgac

SEQ ID NO: 208 - DNA, 64 bp, Artificial Sequence
  Synthetic
gatttagactaccccaaaaacgaaggggactaaaacagcggataaacacaggaaacagctatga

SEQ ID NO: 209 - DNA, 64 bp, Artificial Sequence
  Synthetic
gatttagactaccccaaaaacgaaggggactaaaactgagcggataaacacaggaaacagctat

SEQ ID NO: 210 - DNA, 64 bp, Artificial Sequence
  Synthetic
gatttagactaccccaaaaacgaaggggactaaaactgtgagcggataaacacaggaaacagct

SEQ ID NO: 211 - DNA, 64 bp, Artificial Sequence
  Synthetic
gatttagactaccccaaaaacgaaggggactaaaacttgtgagcggataaacacaggaaacagc

SEQ ID NO: 212 - DNA, 64 bp, Artificial Sequence
  Synthetic
gatttagactaccccaaaaacgaaggggactaaaacggaattgtgagcggataaacacaggaaa

SEQ ID NO: 213 - DNA, 64 bp, Artificial Sequence
  Synthetic
gatttagactaccccaaaaacgaaggggactaaaactggaattgtgagcggataaacacaggaa

SEQ ID NO: 214 - DNA, 64 bp, Artificial Sequence
  Synthetic
gatttagactaccccaaaaacgaaggggactaaaacgtggaattgtgagcggataaacacagga

SEQ ID NO: 215 - DNA, 64 bp, Artificial Sequence
  Synthetic
gatttagactaccccaaaaacgaaggggactaaaactgtggaattgtgagcggataaacacagg

SEQ ID NO: 216 - DNA, 64 bp, Artificial Sequence
  Synthetic
gatttagactaccccaaaaacgaaggggactaaaactgtgtggaattgtgagcggataaacaca

SEQ ID NO: 217 - DNA, 64 bp, Artificial Sequence
  Synthetic
gatttagactaccccaaaaacgaaggggactaaaacttgtgtggaattgtgagcggataaacac

SEQ ID NO: 218 - DNA, 64 bp, Artificial Sequence
  Synthetic
gatttagactaccccaaaaacgaaggggactaaaacgttgtgtggaattgtgagcggataaaca

SEQ ID NO: 219 - DNA, 64 bp, Artificial Sequence
  Synthetic
gatttagactaccccaaaaacgaaggggactaaaacatgttgtgtggaattgtgagcggataaa

SEQ ID NO: 220 - DNA, 64 bp, Artificial Sequence
  Synthetic
gatttagactaccccaaaaacgaaggggactaaaactatgttgtgtggaattgtgagcggataa

SEQ ID NO: 221 - DNA, 64 bp, Artificial Sequence
  Synthetic
gatttagactaccccaaaaacgaaggggactaaaactcgtatgttgtgtggaattgtgagcgga

SEQ ID NO: 222 - DNA, 64 bp, Artificial Sequence
  Synthetic
gatttagactaccccaaaaacgaaggggactaaaacggctcgtatgttgtgtggaattgtgagc

SEQ ID NO: 223 - DNA, 64 bp, Artificial Sequence
  Synthetic
gatttagactaccccaaaaacgaaggggactaaaaccggctcgtatgttgtgtggaattgtgag

SEQ ID NO: 224 - DNA, 64 bp, Artificial Sequence
  Synthetic
gatttagactaccccaaaaacgaaggggactaaaacccggctcgtatgttgtgtggaattgtga

SEQ ID NO: 225 - DNA, 64 bp, Artificial Sequence
  Synthetic
gatttagactaccccaaaaacgaaggggactaaaacttccggctcgtatgttgtgtggaattgt

SEQ ID NO: 226 - DNA, 64 bp, Artificial Sequence
  Synthetic
gatttagactaccccaaaaacgaaggggactaaaaccttccggctcgtatgttgtgtggaattg

SEQ ID NO: 227 - DNA, 64 bp, Artificial Sequence
  Synthetic
gatttagactaccccaaaaacgaaggggactaaaacgcttccggctcgtatgttgtgtggaatt

SEQ ID NO: 228 - DNA, 64 bp, Artificial Sequence
  Synthetic
gatttagactaccccaaaaacgaaggggactaaaacatgcttccggctcgtatgttgtgtggaa

SEQ ID NO: 229 - DNA, 64 bp, Artificial Sequence
  Synthetic
gatttagactaccccaaaaacgaaggggactaaaactatgcttccggctcgtatgttgtgtgga

SEQ ID NO: 230 - DNA, 64 bp, Artificial Sequence
  Synthetic
gatttagactaccccaaaaacgaaggggactaaaacttatgcttccggctcgtatgttgtgtgg

SEQ ID NO: 231 - DNA, 64 bp, Artificial Sequence
  Synthetic
gatttagactaccccaaaaacgaaggggactaaaactaatttaacagtatcaccatcaatcgct

SEQ ID NO: 232 - DNA, 64 bp, Artificial Sequence
  Synthetic
gatttagactaccccaaaaacgaaggggactaaaacttaatttaacagtatcaccatcaatcgc

SEQ ID NO: 233 - DNA, 64 bp, Artificial Sequence
  Synthetic
gatttagactaccccaaaaacgaaggggactaaaacattaatttaacagtatcaccatcaatcg

SEQ ID NO: 234 - DNA, 64 bp, Artificial Sequence
  Synthetic
gatttagactaccccaaaaacgaaggggactaaaaccattaatttaacagtatcaccatcaatc

SEQ ID NO: 235 - DNA, 64 bp, Artificial Sequence
  Synthetic
gatttagactaccccaaaaacgaaggggactaaaacacattaatttaacagtatcaccatcaat

SEQ ID NO: 236 - DNA, 64 bp, Artificial Sequence
  Synthetic
gatttagactaccccaaaaacgaaggggactaaaactacattaatttaacagtatcaccatcaa

SEQ ID NO: 237 - DNA, 64 bp, Artificial Sequence
  Synthetic
gatttagactaccccaaaaacgaaggggactaaaacgtacattaatttaacagtatcaccatca

SEQ ID NO: 238 - DNA, 64 bp, Artificial Sequence
  Synthetic
gatttagactaccccaaaaacgaaggggactaaaactgtacattaatttaacagtatcaccatc

SEQ ID NO: 239 - DNA, 64 bp, Artificial Sequence
  Synthetic
gatttagactaccccaaaaacgaaggggactaaaacttgtacattaatttaacagtatcaccat

SEQ ID NO: 240 - DNA, 64 bp, Artificial Sequence
  Synthetic
gatttagactaccccaaaaacgaaggggactaaaactttgtacattaatttaacagtatcacca

SEQ ID NO: 241 - DNA, 64 bp, Artificial Sequence
  Synthetic
gatttagactaccccaaaaacgaaggggactaaaacctttgtacattaatttaacagtatcacc

SEQ ID NO: 242 - DNA, 64 bp, Artificial Sequence
  Synthetic
gatttagactaccccaaaaacgaaggggactaaaaccctttgtacattaatttaacagtatcac

SEQ ID NO: 243 - DNA, 64 bp, Artificial Sequence
  Synthetic
gatttagactaccccaaaaacgaaggggactaaaacacctttgtacattaatttaacagtatca

SEQ ID NO: 244 - DNA, 64 bp, Artificial Sequence
  Synthetic
gatttagactaccccaaaaacgaaggggactaaaacgacctttgtacattaatttaacagtatc

SEQ ID NO: 245 - DNA, 64 bp, Artificial Sequence
  Synthetic
gatttagactaccccaaaaacgaaggggactaaaactgacctttgtacattaatttaacagtat

SEQ ID NO: 246 - DNA, 64 bp, Artificial Sequence
  Synthetic
gatttagactaccccaaaaacgaaggggactaaaacttgacctttgtacattaatttaacagta

SEQ ID NO: 247 - DNA, 64 bp, Artificial Sequence
  Synthetic
gatttagactaccccaaaaacgaaggggactaaaacgttgacctttgtacattaatttaacagt

SEQ ID NO: 248 - DNA, 64 bp, Artificial Sequence
  Synthetic
gatttagactaccccaaaaacgaaggggactaaaacggttgacctttgtacattaatttaacag

SEQ ID NO: 249 - DNA, 64 bp, Artificial Sequence
  Synthetic
gatttagactaccccaaaaacgaaggggactaaaactggttgacctttgtacattaatttaaca

SEQ ID NO: 250 - DNA, 64 bp, Artificial Sequence
  Synthetic
gatttagactaccccaaaaacgaaggggactaaaacttggttgacctttgtacattaatttaac

SEQ ID NO: 251 - DNA, 64 bp, Artificial Sequence
  Synthetic
gatttagactaccccaaaaacgaaggggactaaaaccattggttgacctttgtacattaattta

SEQ ID NO: 252 - DNA, 64 bp, Artificial Sequence
  Synthetic
gatttagactaccccaaaaacgaaggggactaaaacgtcattggttgacctttgtacattaatt

SEQ ID NO: 253 - DNA, 64 bp, Artificial Sequence
  Synthetic
gatttagactaccccaaaaacgaaggggactaaaacatgtcattggttgacctttgtacattaa

SEQ ID NO: 254 - DNA, 64 bp, Artificial Sequence
  Synthetic
gatttagactaccccaaaaacgaaggggactaaaacgaatgtcattggttgacctttgtacatt

SEQ ID NO: 255 - DNA, 64 bp, Artificial Sequence
  Synthetic
gatttagactaccccaaaaacgaaggggactaaaacctgaatgtcattggttgacctttgtaca

SEQ ID NO: 256 - DNA, 64 bp, Artificial Sequence
  Synthetic
gatttagactaccccaaaaacgaaggggactaaaacgtctgaatgtcattggttgacctttgta

SEQ ID NO: 257 - DNA, 64 bp, Artificial Sequence
  Synthetic
gatttagactaccccaaaaacgaaggggactaaaactagtctgaatgtcattggttgacctttg

SEQ ID NO: 258 - DNA, 64 bp, Artificial Sequence
  Synthetic
gatttagactaccccaaaaacgaaggggactaaaacaatagtctgaatgtcattggttgacctt

SEQ ID NO: 259 - DNA, 64 bp, Artificial Sequence
  Synthetic
gatttagactaccccaaaaacgaaggggactaaaacataatagtctgaatgtcattggttgacc

SEQ ID NO: 260 - DNA, 64 bp, Artificial Sequence
  Synthetic
gatttagactaccccaaaaacgaaggggactaaaaccaataatagtctgaatgtcattggttga

SEQ ID NO: 261 - DNA, 64 bp, Artificial Sequence
  Synthetic
gatttagactaccccaaaaacgaaggggactaaaacaccaataatagtctgaatgtcattggtt

SEQ ID NO: 262 - DNA, 64 bp, Artificial Sequence
  Synthetic
gatttagactaccccaaaaacgaaggggactaaaaccaaccaataatagtctgaatgtcattgg

SEQ ID NO: 263 - DNA, 64 bp, Artificial Sequence
  Synthetic
gatttagactaccccaaaaacgaaggggactaaaacatcaaccaataatagtctgaatgtcatt

SEQ ID NO: 264 - DNA, 64 bp, Artificial Sequence
  Synthetic
gatttagactaccccaaaaacgaaggggactaaaacgtatcaaccaataatagtctgaatgtca

SEQ ID NO: 265 - DNA, 64 bp, Artificial Sequence
  Synthetic
gatttagactaccccaaaaacgaaggggactaaaacgtgtatcaaccaataatagtctgaatgt

SEQ ID NO: 266 - DNA, 64 bp, Artificial Sequence
  Synthetic
gatttagactaccccaaaaacgaaggggactaaaacaggtgtatcaaccaataatagtctgaat

SEQ ID NO: 267 - DNA, 64 bp, Artificial Sequence
  Synthetic
gatttagactaccccaaaaacgaaggggactaaaactcaggtgtatcaaccaataatagtctga

SEQ ID NO: 268 - DNA, 64 bp, Artificial Sequence
  Synthetic
gatttagactaccccaaaaacgaaggggactaaaactttcaggtgtatcaaccaataatagtct

SEQ ID NO: 269 - DNA, 64 bp, Artificial Sequence
  Synthetic
gatttagactaccccaaaaacgaaggggactaaaactgtttcaggtgtatcaaccaataatagt

SEQ ID NO: 270 - DNA, 64 bp, Artificial Sequence
  Synthetic
gatttagactaccccaaaaacgaaggggactaaaactttgtttcaggtgtatcaaccaataata

SEQ ID NO: 271 - DNA, 64 bp, Artificial Sequence
  Synthetic
gatttagactaccccaaaaacgaaggggactaaaacgctttgtttcaggtgtatcaaccaataa

SEQ ID NO: 272 - DNA, 64 bp, Artificial Sequence
  Synthetic
gatttagactaccccaaaaacgaaggggactaaaacatgctttgtttcaggtgtatcaaccaat

SEQ ID NO: 273 - DNA, 64 bp, Artificial Sequence
  Synthetic
gatttagactaccccaaaaacgaaggggactaaaacggatgctttgtttcaggtgtatcaacca

SEQ ID NO: 274 - DNA, 64 bp, Artificial Sequence
  Synthetic
gatttagactaccccaaaaacgaaggggactaaaactaggatgctttgtttcaggtgtatcaac

SEQ ID NO: 275 - DNA, 64 bp, Artificial Sequence
  Synthetic
gatttagactaccccaaaaacgaaggggactaaaactttaggatgctttgtttcaggtgtatca

SEQ ID NO: 276 - DNA, 64 bp, Artificial Sequence
  Synthetic
gatttagactaccccaaaaacgaaggggactaaaactttttaggatgctttgtttcaggtgtat

SEQ ID NO: 277 - DNA, 64 bp, Artificial Sequence
  Synthetic
gatttagactaccccaaaaacgaaggggactaaaaccttttttaggatgctttgtttcaggtgt

SEQ ID NO: 278 - DNA, 64 bp, Artificial Sequence
  Synthetic
gatttagactaccccaaaaacgaaggggactaaaacaccttttttaggatgctttgtttcaggt

SEQ ID NO: 279 - DNA, 64 bp, Artificial Sequence
  Synthetic
gatttagactaccccaaaaacgaaggggactaaaacacaccttttttaggatgctttgtttcag

SEQ ID NO: 280 - DNA, 64 bp, Artificial Sequence
  Synthetic
gatttagactaccccaaaaacgaaggggactaaaacctacaccttttttaggatgctttgtttc

SEQ ID NO: 281 - DNA, 64 bp, Artificial Sequence
  Synthetic
gatttagactaccccaaaaacgaaggggactaaaacctctacaccttttttaggatgctttgtt

SEQ ID NO: 282 - DNA, 64 bp, Artificial Sequence
  Synthetic
gatttagactaccccaaaaacgaaggggactaaaacttctctacaccttttttaggatgctttg

SEQ ID NO: 283 - DNA, 64 bp, Artificial Sequence
  Synthetic
gatttagactaccccaaaaacgaaggggactaaaacatttctctacaccttttttaggatgctt

SEQ ID NO: 284 - DNA, 64 bp, Artificial Sequence
  Synthetic
gatttagactaccccaaaaacgaaggggactaaaacatatttctctacaccttttttaggatgc

SEQ ID NO: 285 - DNA, 64 bp, Artificial Sequence
  Synthetic
gatttagactaccccaaaaacgaaggggactaaaacccatatttctctacaccttttttaggat

SEQ ID NO: 286 - DNA, 64 bp, Artificial Sequence
  Synthetic
gatttagactaccccaaaaacgaaggggactaaaacgaccatatttctctacaccttttttagg

SEQ ID NO: 287 - DNA, 64 bp, Artificial Sequence
  Synthetic
gatttagactaccccaaaaacgaaggggactaaaacaggaccatatttctctacacctttttta

SEQ ID NO: 288 - DNA, 64 bp, Artificial Sequence
  Synthetic
gatttagactaccccaaaaacgaaggggactaaaactcaggaccatatttctctacaccttttt

SEQ ID NO: 289 - DNA, 64 bp, Artificial Sequence
  Synthetic
gatttagactaccccaaaaacgaaggggactaaaaccttcaggaccatatttctctacaccttt

SEQ ID NO: 290 - DNA, 64 bp, Artificial Sequence
  Synthetic
gatttagactaccccaaaaacgaaggggactaaaactgcttcaggaccatatttctctacacct

SEQ ID NO: 291 - DNA, 64 bp, Artificial Sequence
  Synthetic
gatttagactaccccaaaaacgaaggggactaaaaccttgcttcaggaccatatttctctacac

SEQ ID NO: 292 - DNA, 64 bp, Artificial Sequence
  Synthetic
gatttagactaccccaaaaacgaaggggactaaaaccacttgcttcaggaccatatttctctac

SEQ ID NO: 293 - DNA, 64 bp, Artificial Sequence
  Synthetic
gatttagactaccccaaaaacgaaggggactaaaactgcacttgcttcaggaccatatttctct

SEQ ID NO: 294 - DNA, 64 bp, Artificial Sequence
  Synthetic
gatttagactaccccaaaaacgaaggggactaaaacaatgcacttgcttcaggaccatatttct

SEQ ID NO: 295 - DNA, 64 bp, Artificial Sequence
  Synthetic
gatttagactaccccaaaaacgaaggggactaaaactaaatgcacttgcttcaggaccatattt

SEQ ID NO: 296 - DNA, 64 bp, Artificial Sequence
  Synthetic
gatttagactaccccaaaaacgaaggggactaaaacgtaaatgcacttgcttcaggaccatatt

SEQ ID NO: 297 - DNA, 64 bp, Artificial Sequence
  Synthetic
gatttagactaccccaaaaacgaaggggactaaaaccgtaaatgcacttgcttcaggaccatat

SEQ ID NO: 298 - DNA, 64 bp, Artificial Sequence
  Synthetic
gatttagactaccccaaaaacgaaggggactaaaactcgtaaatgcacttgcttcaggaccata

SEQ ID NO: 299 - DNA, 64 bp, Artificial Sequence
  Synthetic
gatttagactaccccaaaaacgaaggggactaaaacttcgtaaatgcacttgcttcaggaccat

SEQ ID NO: 300 - DNA, 64 bp, Artificial Sequence
  Synthetic
gatttagactaccccaaaaacgaaggggactaaaactttcgtaaatgcacttgcttcaggacca

SEQ ID NO: 301 - DNA, 64 bp, Artificial Sequence
  Synthetic
gatttagactaccccaaaaacgaaggggactaaaacttttcgtaaatgcacttgcttcaggacc

SEQ ID NO: 302 - DNA, 64 bp, Artificial Sequence
  Synthetic
gatttagactaccccaaaaacgaaggggactaaaactttttcgtaaatgcacttgcttcaggac

SEQ ID NO: 303 - DNA, 64 bp, Artificial Sequence
  Synthetic
gatttagactaccccaaaaacgaaggggactaaaacctttttcgtaaatgcacttgcttcagga

SEQ ID NO: 304 - DNA, 64 bp, Artificial Sequence
  Synthetic
gatttagactaccccaaaaacgaaggggactaaaactctttttcgtaaatgcacttgcttcagg

SEQ ID NO: 305 - DNA, 64 bp, Artificial Sequence
  Synthetic
gatttagactaccccaaaaacgaaggggactaaaacatctttttcgtaaatgcacttgcttcag

SEQ ID NO: 306 - DNA, 64 bp, Artificial Sequence
  Synthetic
gatttagactaccccaaaaacgaaggggactaaaaccatctttttcgtaaatgcacttgcttca

SEQ ID NO: 307 - DNA, 64 bp, Artificial Sequence
  Synthetic
gatttagactaccccaaaaacgaaggggactaaaacccatctttttcgtaaatgcacttgcttc

SEQ ID NO: 308 - DNA, 64 bp, Artificial Sequence
  Synthetic
gatttagactaccccaaaaacgaaggggactaaaacaccatctttttcgtaaatgcacttgctt

SEQ ID NO: 309 - DNA, 64 bp, Artificial Sequence
  Synthetic
gatttagactaccccaaaaacgaaggggactaaaactaccatctttttcgtaaatgcacttgct

SEQ ID NO: 310 - DNA, 64 bp, Artificial Sequence
  Synthetic
gatttagactaccccaaaaacgaaggggactaaaacctaccatctttttcgtaaatgcacttgc

SEQ ID NO: 311 - DNA, 64 bp, Artificial Sequence
  Synthetic
gatttagactaccccaaaaacgaaggggactaaaactctaccatctttttcgtaaatgcacttg

SEQ ID NO: 312 - DNA, 64 bp, Artificial Sequence
  Synthetic
gatttagactaccccaaaaacgaaggggactaaaacttctaccatctttttcgtaaatgcactt

SEQ ID NO: 313 - DNA, 64 bp, Artificial Sequence
  Synthetic
gatttagactaccccaaaaacgaaggggactaaaactttctaccatctttttcgtaaatgcact

SEQ ID NO: 314 - DNA, 64 bp, Artificial Sequence
  Synthetic
gatttagactaccccaaaaacgaaggggactaaaacttttctaccatctttttcgtaaatgcac

SEQ ID NO: 315 - DNA, 64 bp, Artificial Sequence
  Synthetic
gatttagactaccccaaaaacgaaggggactaaaacattttctaccatctttttcgtaaatgca

SEQ ID NO: 316 - DNA, 64 bp, Artificial Sequence
  Synthetic
gatttagactaccccaaaaacgaaggggactaaaaccattttctaccatctttttcgtaaatgc

SEQ ID NO: 317 - DNA, 64 bp, Artificial Sequence
  Synthetic
gatttagactaccccaaaaacgaaggggactaaaacgcattttctaccatctttttcgtaaatg

SEQ ID NO: 318 - DNA, 64 bp, Artificial Sequence
  Synthetic
gatttagactaccccaaaaacgaaggggactaaaactgcattttctaccatctttttcgtaaat

SEQ ID NO: 319 - DNA, 64 bp, Artificial Sequence
  Synthetic
gatttagactaccccaaaaacgaaggggactaaaacttgcattttctaccatctttttcgtaaa

SEQ ID NO: 320 - DNA, 64 bp, Artificial Sequence
  Synthetic
gatttagactaccccaaaaacgaaggggactaaaactttgcattttctaccatctttttcgtaa

SEQ ID NO: 321 - DNA, 64 bp, Artificial Sequence
  Synthetic
gatttagactaccccaaaaacgaaggggactaaaacctttgcattttctaccatctttttcgta

SEQ ID NO: 322 - DNA, 64 bp, Artificial Sequence
  Synthetic
gatttagactaccccaaaaacgaaggggactaaaactctttgcattttctaccatctttttcgt

SEQ ID NO: 323 - DNA, 64 bp, Artificial Sequence
  Synthetic
gatttagactaccccaaaaacgaaggggactaaaacttctttgcattttctaccatctttttcg

SEQ ID NO: 324 - DNA, 64 bp, Artificial Sequence
  Synthetic
gatttagactaccccaaaaacgaaggggactaaaactttctttgcattttctaccatctttttc

SEQ ID NO: 325 - DNA, 64 bp, Artificial Sequence
  Synthetic
gatttagactaccccaaaaacgaaggggactaaaacttttctttgcattttctaccatcttttt

SEQ ID NO: 326 - DNA, 64 bp, Artificial Sequence
  Synthetic
gatttagactaccccaaaaacgaaggggactaaaacattttctttgcattttctaccatctttt

SEQ ID NO: 327 - DNA, 64 bp, Artificial Sequence
  Synthetic
gatttagactaccccaaaaacgaaggggactaaaactgttgttccagtgtggagttccggtgtc

SEQ ID NO: 328 - DNA, 64 bp, Artificial Sequence
  Synthetic
gatttagactaccccaaaaacgaaggggactaaaacttgttgttccagtgtggagttccggtgt

SEQ ID NO: 329 - DNA, 64 bp, Artificial Sequence
  Synthetic
gatttagactaccccaaaaacgaaggggactaaaactttgttgttccagtgtggagttccggtg

SEQ ID NO: 330 - DNA, 64 bp, Artificial Sequence
  Synthetic
gatttagactaccccaaaaacgaaggggactaaaacctttgttgttccagtgtggagttccggt

SEQ ID NO: 331 - DNA, 64 bp, Artificial Sequence
  Synthetic
gatttagactaccccaaaaacgaaggggactaaaactctttgttgttccagtgtggagttccgg

SEQ ID NO: 332 - DNA, 64 bp, Artificial Sequence
  Synthetic
gatttagactaccccaaaaacgaaggggactaaaacttctttgttgttccagtgtggagttccg

SEQ ID NO: 333 - DNA, 64 bp, Artificial Sequence
  Synthetic
gatttagactaccccaaaaacgaaggggactaaaaccttctttgttgttccagtgtggagttcc

SEQ ID NO: 334 - DNA, 64 bp, Artificial Sequence
  Synthetic
gatttagactaccccaaaaacgaaggggactaaaacgcttctttgttgttccagtgtggagttc

SEQ ID NO: 335 - DNA, 64 bp, Artificial Sequence
  Synthetic
gatttagactaccccaaaaacgaaggggactaaaactgcttctttgttgttccagtgtggagtt

SEQ ID NO: 336 - DNA, 64 bp, Artificial Sequence
  Synthetic
gatttagactaccccaaaaacgaaggggactaaaacgtgcttctttgttgttccagtgtggagt

SEQ ID NO: 337 - DNA, 64 bp, Artificial Sequence
  Synthetic
gatttagactaccccaaaaacgaaggggactaaaacagtgcttctttgttgttccagtgtggag

SEQ ID NO: 338 - DNA, 64 bp, Artificial Sequence
  Synthetic
gatttagactaccccaaaaacgaaggggactaaaaccagtgcttctttgttgttccagtgtgga

SEQ ID NO: 339 - DNA, 64 bp, Artificial Sequence
  Synthetic
gatttagactaccccaaaaacgaaggggactaaaacccagtgcttctttgttgttccagtgtgg

SEQ ID NO: 340 - DNA, 64 bp, Artificial Sequence
  Synthetic
gatttagactaccccaaaaacgaaggggactaaaacaccagtgcttctttgttgttccagtgtg

SEQ ID NO: 341 - DNA, 64 bp, Artificial Sequence
  Synthetic
gatttagactaccccaaaaacgaaggggactaaaactaccagtgcttctttgttgttccagtgt

SEQ ID NO: 342 - DNA, 64 bp, Artificial Sequence
  Synthetic
gatttagactaccccaaaaacgaaggggactaaaacctaccagtgcttctttgttgttccagtg

SEQ ID NO: 343 - DNA, 64 bp, Artificial Sequence
  Synthetic
gatttagactaccccaaaaacgaaggggactaaaactctaccagtgcttctttgttgttccagt

SEQ ID NO: 344 - DNA, 64 bp, Artificial Sequence
  Synthetic
gatttagactaccccaaaaacgaaggggactaaaacctctaccagtgcttctttgttgttccag

SEQ ID NO: 345 - DNA, 64 bp, Artificial Sequence
  Synthetic
gatttagactaccccaaaaacgaaggggactaaaacactctaccagtgcttctttgttgttcca

SEQ ID NO: 346 - DNA, 64 bp, Artificial Sequence
  Synthetic
gatttagactaccccaaaaacgaaggggactaaaacaactctaccagtgcttctttgttgttcc

SEQ ID NO: 347 - DNA, 64 bp, Artificial Sequence
  Synthetic
gatttagactaccccaaaaacgaaggggactaaaactgaactctaccagtgcttctttgttgtt

SEQ ID NO: 348 - DNA, 64 bp, Artificial Sequence
  Synthetic
gatttagactaccccaaaaacgaaggggactaaaaccttgaactctaccagtgcttctttgttg

SEQ ID NO: 349 - DNA, 64 bp, Artificial Sequence
  Synthetic
gatttagactaccccaaaaacgaaggggactaaaactccttgaactctaccagtgcttctttgt

SEQ ID NO: 350 - DNA, 64 bp, Artificial Sequence
  Synthetic
gatttagactaccccaaaaacgaaggggactaaaaccgtccttgaactctaccagtgcttcttt

SEQ ID NO: 351 - DNA, 64 bp, Artificial Sequence
  Synthetic
gatttagactaccccaaaaacgaaggggactaaaactgcgtccttgaactctaccagtgcttct

SEQ ID NO: 352 - DNA, 64 bp, Artificial Sequence
  Synthetic
gatttagactaccccaaaaacgaaggggactaaaactgtgcgtccttgaactctaccagtgctt

SEQ ID NO: 353 - DNA, 64 bp, Artificial Sequence
  Synthetic
gatttagactaccccaaaaacgaaggggactaaaaccatgtgcgtccttgaactctaccagtgc

SEQ ID NO: 354 - DNA, 64 bp, Artificial Sequence
  Synthetic
gatttagactaccccaaaaacgaaggggactaaaacggcatgtgcgtccttgaactctaccagt

SEQ ID NO: 355 - DNA, 64 bp, Artificial Sequence
  Synthetic
gatttagactaccccaaaaacgaaggggactaaaacttggcatgtgcgtccttgaactctacca

SEQ ID NO: 356 - DNA, 64 bp, Artificial Sequence
  Synthetic
gatttagactaccccaaaaacgaaggggactaaaacttttggcatgtgcgtccttgaactctac

SEQ ID NO: 357 - DNA, 64 bp, Artificial Sequence
  Synthetic
gatttagactaccccaaaaacgaaggggactaaaacccttttggcatgtgcgtccttgaactct

SEQ ID NO: 358 - DNA, 64 bp, Artificial Sequence
  Synthetic
gatttagactaccccaaaaacgaaggggactaaaactgccttttggcatgtgcgtccttgaact

SEQ ID NO: 359 - DNA, 64 bp, Artificial Sequence
  Synthetic
gatttagactaccccaaaaacgaaggggactaaaactttgccttttggcatgtgcgtccttgaa

SEQ ID NO: 360 - DNA, 64 bp, Artificial Sequence
  Synthetic
gatttagactaccccaaaaacgaaggggactaaaacagtttgccttttggcatgtgcgtccttg

SEQ ID NO: 361 - DNA, 64 bp, Artificial Sequence
  Synthetic
gatttagactaccccaaaaacgaaggggactaaaacacagtttgccttttggcatgtgcgtcct

SEQ ID NO: 362 - DNA, 64 bp, Artificial Sequence
  Synthetic
gatttagactaccccaaaaacgaaggggactaaaaccgacagtttgccttttggcatgtgcgtc

SEQ ID NO: 363 - DNA, 64 bp, Artificial Sequence
  Synthetic
gatttagactaccccaaaaacgaaggggactaaaaccacgacagtttgccttttggcatgtgcg

SEQ ID NO: 364 - DNA, 64 bp, Artificial Sequence
  Synthetic
gatttagactaccccaaaaacgaaggggactaaaacaccacgacagtttgccttttggcatgtg

SEQ ID NO: 365 - DNA, 64 bp, Artificial Sequence
  Synthetic
gatttagactaccccaaaaacgaaggggactaaaacgaaccacgacagtttgccttttggcatg

SEQ ID NO: 366 - DNA, 64 bp, Artificial Sequence
  Synthetic
gatttagactaccccaaaaacgaaggggactaaaactagaaccacgacagtttgccttttggca

SEQ ID NO: 367 - DNA, 64 bp, Artificial Sequence
  Synthetic
gatttagactaccccaaaaacgaaggggactaaaaccctagaaccacgacagtttgccttttgg

SEQ ID NO: 368 - DNA, 64 bp, Artificial Sequence
  Synthetic
gatttagactaccccaaaaacgaaggggactaaaactccctagaaccacgacagtttgcctttt

SEQ ID NO: 369 - DNA, 64 bp, Artificial Sequence
  Synthetic
gatttagactaccccaaaaacgaaggggactaaaacactccctagaaccacgacagtttgcctt

SEQ ID NO: 370 - DNA, 64 bp, Artificial Sequence
  Synthetic
gatttagactaccccaaaaacgaaggggactaaaactgactccctagaaccacgacagtttgcc

SEQ ID NO: 371 - DNA, 64 bp, Artificial Sequence
  Synthetic
gatttagactaccccaaaaacgaaggggactaaaaccttgactccctagaaccacgacagtttg

SEQ ID NO: 372 - DNA, 64 bp, Artificial Sequence
  Synthetic
gatttagactaccccaaaaacgaaggggactaaaacttcttgactccctagaaccacgacagtt

SEQ ID NO: 373 - DNA, 64 bp, Artificial Sequence
  Synthetic
gatttagactaccccaaaaacgaaggggactaaaacccttcttgactccctagaaccacgacag

SEQ ID NO: 374 - DNA, 64 bp, Artificial Sequence
  Synthetic
gatttagactaccccaaaaacgaaggggactaaaacctccttcttgactccctagaaccacgac

SEQ ID NO: 375 - DNA, 64 bp, Artificial Sequence
  Synthetic
gatttagactaccccaaaaacgaaggggactaaaactgctccttcttgactccctagaaccacg

SEQ ID NO: 376 - DNA, 64 bp, Artificial Sequence
  Synthetic
gatttagactaccccaaaaacgaaggggactaaaacactgctccttcttgactccctagaacca

SEQ ID NO: 377 - DNA, 64 bp, Artificial Sequence
  Synthetic
gatttagactaccccaaaaacgaaggggactaaaacgaactgctccttcttgactccctagaac

SEQ ID NO: 378 - DNA, 64 bp, Artificial Sequence
  Synthetic
gatttagactaccccaaaaacgaaggggactaaaacgtgaactgctccttcttgactccctaga

SEQ ID NO: 379 - DNA, 64 bp, Artificial Sequence
  Synthetic
gatttagactaccccaaaaacgaaggggactaaaacgtgtgaactgctccttcttgactcccta

SEQ ID NO: 380 - DNA, 64 bp, Artificial Sequence
  Synthetic
gatttagactaccccaaaaacgaaggggactaaaacccgtgtgaactgctccttcttgactccc

SEQ ID NO: 381 - DNA, 64 bp, Artificial Sequence
  Synthetic
gatttagactaccccaaaaacgaaggggactaaaacggccgtgtgaactgctccttcttgactc

SEQ ID NO: 382 - DNA, 64 bp, Artificial Sequence
  Synthetic
gatttagactaccccaaaaacgaaggggactaaaacagggccgtgtgaactgctccttcttgac

SEQ ID NO: 383 - DNA, 64 bp, Artificial Sequence
  Synthetic
gatttagactaccccaaaaacgaaggggactaaaaccaagggccgtgtgaactgctccttcttg

SEQ ID NO: 384 - DNA, 64 bp, Artificial Sequence
  Synthetic
gatttagactaccccaaaaacgaaggggactaaaacagcaagggccgtgtgaactgctccttct

SEQ ID NO: 385 - DNA, 64 bp, Artificial Sequence
  Synthetic
gatttagactaccccaaaaacgaaggggactaaaacccagcaagggccgtgtgaactgctcctt

SEQ ID NO: 386 - DNA, 64 bp, Artificial Sequence
  Synthetic
gatttagactaccccaaaaacgaaggggactaaaacctccagcaagggccgtgtgaactgctcc

SEQ ID NO: 387 - DNA, 64 bp, Artificial Sequence
  Synthetic
gatttagactaccccaaaaacgaaggggactaaaacagctccagcaagggccgtgtgaactgct

SEQ ID NO: 388 - DNA, 64 bp, Artificial Sequence
  Synthetic
gatttagactaccccaaaaacgaaggggactaaaacagagctccagcaagggccgtgtgaactg

SEQ ID NO: 389 - DNA, 64 bp, Artificial Sequence
  Synthetic
gatttagactaccccaaaaacgaaggggactaaaacccagagctccagcaagggccgtgtgaac

SEQ ID NO: 390 - DNA, 64 bp, Artificial Sequence
  Synthetic
gatttagactaccccaaaaacgaaggggactaaaacctccagagctccagcaagggccgtgtga

SEQ ID NO: 391 - DNA, 64 bp, Artificial Sequence
  Synthetic
gatttagactaccccaaaaacgaaggggactaaaacgcctccagagctccagcaagggccgtgt

SEQ ID NO: 392 - DNA, 64 bp, Artificial Sequence
  Synthetic
gatttagactaccccaaaaacgaaggggactaaaaccagcctccagagctccagcaagggccgt

SEQ ID NO: 393 - DNA, 64 bp, Artificial Sequence
  Synthetic
gatttagactaccccaaaaacgaaggggactaaaacctcagcctccagagctccagcaagggcc

SEQ ID NO: 394 - DNA, 64 bp, Artificial Sequence
  Synthetic
gatttagactaccccaaaaacgaaggggactaaaacatctcagcctccagagctccagcaaggg

SEQ ID NO: 395 - DNA, 64 bp, Artificial Sequence
  Synthetic
gatttagactaccccaaaaacgaaggggactaaaaccatctcagcctccagagctccagcaagg

SEQ ID NO: 396 - DNA, 64 bp, Artificial Sequence
  Synthetic
gatttagactaccccaaaaacgaaggggactaaaacccatctcagcctccagagctccagcaag

SEQ ID NO: 397 - DNA, 64 bp, Artificial Sequence
  Synthetic
gatttagactaccccaaaaacgaaggggactaaaactccatctcagcctccagagctccagcaa

SEQ ID NO: 398 - DNA, 64 bp, Artificial Sequence
  Synthetic
gatttagactaccccaaaaacgaaggggactaaaacatccatctcagcctccagagctccagca

SEQ ID NO: 399 - DNA, 64 bp, Artificial Sequence
  Synthetic
gatttagactaccccaaaaacgaaggggactaaaaccatccatctcagcctccagagctccagc

SEQ ID NO: 400 - DNA, 64 bp, Artificial Sequence
  Synthetic
gatttagactaccccaaaaacgaaggggactaaaacccatccatctcagcctccagagctccag

SEQ ID NO: 401 - DNA, 64 bp, Artificial Sequence
  Synthetic
gatttagactaccccaaaaacgaaggggactaaaacaccatccatctcagcctccagagctcca

SEQ ID NO: 402 - DNA, 64 bp, Artificial Sequence
  Synthetic
gatttagactaccccaaaaacgaaggggactaaaaccaccatccatctcagcctccagagctcc

SEQ ID NO: 403 - DNA, 64 bp, Artificial Sequence
  Synthetic
gatttagactaccccaaaaacgaaggggactaaaacgcaccatccatctcagcctccagagctc

SEQ ID NO: 404 - DNA, 64 bp, Artificial Sequence
  Synthetic
gatttagactaccccaaaaacgaaggggactaaaactgcaccatccatctcagcctccagagct

SEQ ID NO: 405 - DNA, 64 bp, Artificial Sequence
  Synthetic
gatttagactaccccaaaaacgaaggggactaaaacttgcaccatccatctcagcctccagagc

SEQ ID NO: 406 - DNA, 64 bp, Artificial Sequence
  Synthetic
gatttagactaccccaaaaacgaaggggactaaaactttgcaccatccatctcagcctccagag

SEQ ID NO: 407 - DNA, 64 bp, Artificial Sequence
  Synthetic
gatttagactaccccaaaaacgaaggggactaaaacctttgcaccatccatctcagcctccaga

SEQ ID NO: 408 - DNA, 64 bp, Artificial Sequence
  Synthetic
gatttagactaccccaaaaacgaaggggactaaaaccctttgcaccatccatctcagcctccag

SEQ ID NO: 409 - DNA, 64 bp, Artificial Sequence
  Synthetic
gatttagactaccccaaaaacgaaggggactaaaacccctttgcaccatccatctcagcctcca

SEQ ID NO: 410 - DNA, 64 bp, Artificial Sequence
  Synthetic
gatttagactaccccaaaaacgaaggggactaaaactccctttgcaccatccatctcagcctcc

SEQ ID NO: 411 - DNA, 64 bp, Artificial Sequence
  Synthetic
gatttagactaccccaaaaacgaaggggactaaaacttccctttgcaccatccatctcagcctc

SEQ ID NO: 412 - DNA, 64 bp, Artificial Sequence
  Synthetic
gatttagactaccccaaaaacgaaggggactaaaaccttccctttgcaccatccatctcagcct

SEQ ID NO: 413 - DNA, 64 bp, Artificial Sequence
  Synthetic
gatttagactaccccaaaaacgaaggggactaaaacccttccctttgcaccatccatctcagcc

SEQ ID NO: 414 - DNA, 64 bp, Artificial Sequence
  Synthetic
gatttagactaccccaaaaacgaaggggactaaaacgccttccctttgcaccatccatctcagc

SEQ ID NO: 415 - DNA, 64 bp, Artificial Sequence
  Synthetic
gatttagactaccccaaaaacgaaggggactaaaacagccttccctttgcaccatccatctcag

SEQ ID NO: 416 - DNA, 64 bp, Artificial Sequence
  Synthetic
gatttagactaccccaaaaacgaaggggactaaaaccagccttccctttgcaccatccatctca

SEQ ID NO: 417 - DNA, 64 bp, Artificial Sequence
  Synthetic
gatttagactaccccaaaaacgaaggggactaaaacacagccttccctttgcaccatccatctc

SEQ ID NO: 418 - DNA, 64 bp, Artificial Sequence
  Synthetic
gatttagactaccccaaaaacgaaggggactaaaacgacagccttccctttgcaccatccatct

SEQ ID NO: 419 - DNA, 64 bp, Artificial Sequence
  Synthetic
gatttagactaccccaaaaacgaaggggactaaaacggacagccttccctttgcaccatccatc

SEQ ID NO: 420 - DNA, 64 bp, Artificial Sequence
  Synthetic
gatttagactaccccaaaaacgaaggggactaaaacaggacagccttccctttgcaccatccat

SEQ ID NO: 421 - DNA, 64 bp, Artificial Sequence
  Synthetic
gatttagactaccccaaaaacgaaggggactaaaacgaggacagccttccctttgcaccatcca

SEQ ID NO: 422 - DNA, 66 bp, Artificial Sequence
  Synthetic
tttgttgttccagtgtggagttccggtgtcgttggaactgctctcattttggagggtaatcacaac

SEQ ID NO: 423 - DNA, 66 bp, Artificial Sequence
  Synthetic
ctttgttgttccagtgtggagttccggtgtgttggaactgctctcattttggagggtaatcacaac

SEQ ID NO: 424 - DNA, 66 bp, Artificial Sequence
  Synthetic
tctttgttgttccagtgtggagttccggtggttggaactgctctcattttggagggtaatcacaac

SEQ ID NO: 425 - DNA, 66 bp, Artificial Sequence
  Synthetic
ttctttgttgttccagtgtggagttccggtgttggaactgctctcattttggagggtaatcacaac

SEQ ID NO: 426 - DNA, 66 bp, Artificial Sequence
  Synthetic
cttctttgttgttccagtgtggagttccgggttggaactgctctcattttggagggtaatcacaac

SEQ ID NO: 427 - DNA, 66 bp, Artificial Sequence
  Synthetic
gcttctttgttgttccagtgtggagttccggttggaactgctctcattttggagggtaatcacaac

SEQ ID NO: 428 - DNA, 66 bp, Artificial Sequence
  Synthetic
tgcttctttgttgttccagtgtggagttccgttggaactgctctcattttggagggtaatcacaac

SEQ ID NO: 429 - DNA, 66 bp, Artificial Sequence
  Synthetic
gtgcttctttgttgttccagtgtggagttcgttggaactgctctcattttggagggtaatcacaac

SEQ ID NO: 430 - DNA, 66 bp, Artificial Sequence
  Synthetic
agtgcttctttgttgttccagtgtggagttgttggaactgctctcattttggagggtaatcacaac

SEQ ID NO: 431 - DNA, 66 bp, Artificial Sequence
  Synthetic
cagtgcttctttgttgttccagtgtggagtgttggaactgctctcattttggagggtaatcacaac

SEQ ID NO: 432 - DNA, 66 bp, Artificial Sequence
  Synthetic
ccagtgcttctttgttgttccagtgtggaggttggaactgctctcattttggagggtaatcacaac

SEQ ID NO: 433 - DNA, 66 bp, Artificial Sequence
  Synthetic
accagtgcttctttgttgttccagtgtggagttggaactgctctcattttggagggtaatcacaac

SEQ ID NO: 434 - DNA, 66 bp, Artificial Sequence
  Synthetic
taccagtgcttctttgttgttccagtgtgggttggaactgctctcattttggagggtaatcacaac

SEQ ID NO: 435 - DNA, 66 bp, Artificial Sequence
  Synthetic
ctaccagtgcttctttgttgttccagtgtggttggaactgctctcattttggagggtaatcacaac

SEQ ID NO: 436 - DNA, 66 bp, Artificial Sequence
  Synthetic
tctaccagtgcttctttgttgttccagtgtgttggaactgctctcattttggagggtaatcacaac

SEQ ID NO: 437 - DNA, 66 bp, Artificial Sequence
  Synthetic
ctctaccagtgcttctttgttgttccagtggttggaactgctctcattttggagggtaatcacaac

SEQ ID NO: 438 - DNA, 66 bp, Artificial Sequence
  Synthetic
actctaccagtgcttctttgttgttccagtgttggaactgctctcattttggagggtaatcacaac

SEQ ID NO: 439 - DNA, 66 bp, Artificial Sequence
  Synthetic
aactctaccagtgcttctttgttgttccaggttggaactgctctcattttggagggtaatcacaac

SEQ ID NO: 440 - DNA, 66 bp, Artificial Sequence
  Synthetic
gaactctaccagtgcttctttgttgttccagttggaactgctctcattttggagggtaatcacaac

SEQ ID NO: 441 - DNA, 66 bp, Artificial Sequence
  Synthetic
tgaactctaccagtgcttctttgttgttccgttggaactgctctcattttggagggtaatcacaac

SEQ ID NO: 442 - DNA, 66 bp, Artificial Sequence
  Synthetic
cttgaactctaccagtgcttctttgttgttgttggaactgctctcattttggagggtaatcacaac

SEQ ID NO: 443 - DNA, 66 bp, Artificial Sequence
  Synthetic
tccttgaactctaccagtgcttctttgttggttggaactgctctcattttggagggtaatcacaac

SEQ ID NO: 444 - DNA, 66 bp, Artificial Sequence
  Synthetic
cgtccttgaactctaccagtgcttctttgtgttggaactgctctcattttggagggtaatcacaac

SEQ ID NO: 445 - DNA, 66 bp, Artificial Sequence
  Synthetic
tgcgtccttgaactctaccagtgcttctttgttggaactgctctcattttggagggtaatcacaac

SEQ ID NO: 446 - DNA, 66 bp, Artificial Sequence
  Synthetic
tgtgcgtccttgaactctaccagtgcttctgttggaactgctctcattttggagggtaatcacaac

SEQ ID NO: 447 - DNA, 66 bp, Artificial Sequence
  Synthetic
catgtgcgtccttgaactctaccagtgcttgttggaactgctctcattttggagggtaatcacaac

SEQ ID NO: 448 - DNA, 66 bp, Artificial Sequence
  Synthetic
ggcatgtgcgtccttgaactctaccagtgcgttggaactgctctcattttggagggtaatcacaac

SEQ ID NO: 449 - DNA, 66 bp, Artificial Sequence
  Synthetic
ttggcatgtgcgtccttgaactctaccagtgttggaactgctctcattttggagggtaatcacaac

SEQ ID NO: 450 - DNA, 66 bp, Artificial Sequence
  Synthetic
ttttggcatgtgcgtccttgaactctaccagttggaactgctctcattttggagggtaatcacaac

SEQ ID NO: 451 - DNA, 66 bp, Artificial Sequence
  Synthetic
ccttttggcatgtgcgtccttgaactctacgttggaactgctctcattttggagggtaatcacaac

SEQ ID NO: 452 - DNA, 66 bp, Artificial Sequence
  Synthetic
tgccttttggcatgtgcgtccttgaactctgttggaactgctctcattttggagggtaatcacaac

SEQ ID NO: 453 - DNA, 66 bp, Artificial Sequence
  Synthetic
tttgccttttggcatgtgcgtccttgaactgttggaactgctctcattttggagggtaatcacaac

SEQ ID NO: 454 - DNA, 66 bp, Artificial Sequence
  Synthetic
agtttgccttttggcatgtgcgtccttgaagttggaactgctctcattttggagggtaatcacaac

SEQ ID NO: 455 - DNA, 66 bp, Artificial Sequence
  Synthetic
acagtttgccttttggcatgtgcgtccttggttggaactgctctcattttggagggtaatcacaac

SEQ ID NO: 456 - DNA, 66 bp, Artificial Sequence
  Synthetic
cgacagtttgccttttggcatgtgcgtcctgttggaactgctctcattttggagggtaatcacaac

SEQ ID NO: 457 - DNA, 66 bp, Artificial Sequence
  Synthetic
cacgacagtttgccttttggcatgtgcgtcgttggaactgctctcattttggagggtaatcacaac

SEQ ID NO: 458 - DNA, 66 bp, Artificial Sequence
  Synthetic
accacgacagtttgccttttggcatgtgcggttggaactgctctcattttggagggtaatcacaac

SEQ ID NO: 459 - DNA, 66 bp, Artificial Sequence
  Synthetic
gaaccacgacagtttgccttttggcatgtggttggaactgctctcattttggagggtaatcacaac

SEQ ID NO: 460 - DNA, 66 bp, Artificial Sequence
  Synthetic
tagaaccacgacagtttgccttttggcatggttggaactgctctcattttggagggtaatcacaac

SEQ ID NO: 461 - DNA, 66 bp, Artificial Sequence
  Synthetic
cctagaaccacgacagtttgccttttggcagttggaactgctctcattttggagggtaatcacaac

SEQ ID NO: 462 - DNA, 66 bp, Artificial Sequence
  Synthetic
tccctagaaccacgacagtttgccttttgggttggaactgctctcattttggagggtaatcacaac

SEQ ID NO: 463 - DNA, 66 bp, Artificial Sequence
  Synthetic
actccctagaaccacgacagtttgccttttgttggaactgctctcattttggagggtaatcacaac

SEQ ID NO: 464 - DNA, 66 bp, Artificial Sequence
  Synthetic
tgactccctagaaccacgacagtttgccttgttggaactgctctcattttggagggtaatcacaac

SEQ ID NO: 465 - DNA, 66 bp, Artificial Sequence
  Synthetic
cttgactccctagaaccacgacagtttgccgttggaactgctctcattttggagggtaatcacaac

SEQ ID NO: 466 - DNA, 66 bp, Artificial Sequence
  Synthetic
ttcttgactccctagaaccacgacagtttggttggaactgctctcattttggagggtaatcacaac

SEQ ID NO: 467 - DNA, 66 bp, Artificial Sequence
  Synthetic
ccttcttgactccctagaaccacgacagttgttggaactgctctcattttggagggtaatcacaac

SEQ ID NO: 468 - DNA, 66 bp, Artificial Sequence
  Synthetic
ctccttcttgactccctagaaccacgacaggttggaactgctctcattttggagggtaatcacaac

SEQ ID NO: 469 - DNA, 66 bp, Artificial Sequence
  Synthetic
tgctccttcttgactccctagaaccacgacgttggaactgctctcattttggagggtaatcacaac

SEQ ID NO: 470 - DNA, 66 bp, Artificial Sequence
  Synthetic
actgctccttcttgactccctagaaccacggttggaactgctctcattttggagggtaatcacaac

SEQ ID NO: 471 - DNA, 66 bp, Artificial Sequence
  Synthetic
gaactgctccttcttgactccctagaaccagttggaactgctctcattttggagggtaatcacaac

SEQ ID NO: 472 - DNA, 66 bp, Artificial Sequence
  Synthetic
gtgaactgctccttcttgactccctagaacgttggaactgctctcattttggagggtaatcacaac

SEQ ID NO: 473 - DNA, 66 bp, Artificial Sequence
  Synthetic
gtgtgaactgctccttcttgactccctagagttggaactgctctcattttggagggtaatcacaac

SEQ ID NO: 474 - DNA, 66 bp, Artificial Sequence
  Synthetic
ccgtgtgaactgctccttcttgactccctagttggaactgctctcattttggagggtaatcacaac

SEQ ID NO: 475 - DNA, 66 bp, Artificial Sequence
  Synthetic
ggccgtgtgaactgctccttcttgactcccgttggaactgctctcattttggagggtaatcacaac

SEQ ID NO: 476 - DNA, 66 bp, Artificial Sequence
  Synthetic
agggccgtgtgaactgctccttcttgactcgttggaactgctctcattttggagggtaatcacaac

SEQ ID NO: 477 - DNA, 66 bp, Artificial Sequence
  Synthetic
caagggccgtgtgaactgctccttcttgacgttggaactgctctcattttggagggtaatcacaac

SEQ ID NO: 478 - DNA, 66 bp, Artificial Sequence
  Synthetic
agcaagggccgtgtgaactgctccttcttggttggaactgctctcattttggagggtaatcacaac

SEQ ID NO: 479 - DNA, 66 bp, Artificial Sequence
  Synthetic
ccagcaagggccgtgtgaactgctccttctgttggaactgctctcattttggagggtaatcacaac

SEQ ID NO: 480 - DNA, 66 bp, Artificial Sequence
  Synthetic
ctccagcaagggccgtgtgaactgctccttgttggaactgctctcattttggagggtaatcacaac

SEQ ID NO: 481 - DNA, 66 bp, Artificial Sequence
  Synthetic
agctccagcaagggccgtgtgaactgctccgttggaactgctctcattttggagggtaatcacaac

SEQ ID NO: 482 - DNA, 66 bp, Artificial Sequence
  Synthetic
agagctccagcaagggccgtgtgaactgctgttggaactgctctcattttggagggtaatcacaac

SEQ ID NO: 483 - DNA, 66 bp, Artificial Sequence
  Synthetic
ccagagctccagcaagggccgtgtgaactggttggaactgctctcattttggagggtaatcacaac

SEQ ID NO: 484 - DNA, 66 bp, Artificial Sequence
  Synthetic
ctccagagctccagcaagggccgtgtgaacgttggaactgctctcattttggagggtaatcacaac

SEQ ID NO: 485 - DNA, 66 bp, Artificial Sequence
  Synthetic
gcctccagagctccagcaagggccgtgtgagttggaactgctctcattttggagggtaatcacaac

SEQ ID NO: 486 - DNA, 66 bp, Artificial Sequence
  Synthetic
cagcctccagagctccagcaagggccgtgtgttggaactgctctcattttggagggtaatcacaac

SEQ ID NO: 487 - DNA, 66 bp, Artificial Sequence
  Synthetic
ctcagcctccagagctccagcaagggccgtgttggaactgctctcattttggagggtaatcacaac

SEQ ID NO: 488 - DNA, 66 bp, Artificial Sequence
  Synthetic
atctcagcctccagagctccagcaagggccgttggaactgctctcattttggagggtaatcacaac

SEQ ID NO: 489 - DNA, 66 bp, Artificial Sequence
  Synthetic
ccatctcagcctccagagctccagcaaggggttggaactgctctcattttggagggtaatcacaac

SEQ ID NO: 490 - DNA, 66 bp, Artificial Sequence
  Synthetic
tccatctcagcctccagagctccagcaagggttggaactgctctcattttggagggtaatcacaac

SEQ ID NO: 491 - DNA, 66 bp, Artificial Sequence
  Synthetic
atccatctcagcctccagagctccagcaaggttggaactgctctcattttggagggtaatcacaac

SEQ ID NO: 492 - DNA, 66 bp, Artificial Sequence
  Synthetic
catccatctcagcctccagagctccagcaagttggaactgctctcattttggagggtaatcacaac

SEQ ID NO: 493 - DNA, 66 bp, Artificial Sequence
  Synthetic
ccatccatctcagcctccagagctccagcagttggaactgctctcattttggagggtaatcacaac

SEQ ID NO: 494 - DNA, 66 bp, Artificial Sequence
  Synthetic
accatccatctcagcctccagagctccagcgttggaactgctctcattttggagggtaatcacaac

SEQ ID NO: 495 - DNA, 66 bp, Artificial Sequence
  Synthetic
caccatccatctcagcctccagagctccaggttggaactgctctcattttggagggtaatcacaac

SEQ ID NO: 496 - DNA, 66 bp, Artificial Sequence
  Synthetic
gcaccatccatctcagcctccagagctccagttggaactgctctcattttggagggtaatcacaac

SEQ ID NO: 497 - DNA, 66 bp, Artificial Sequence
  Synthetic
tgcaccatccatctcagcctccagagctccgttggaactgctctcattttggagggtaatcacaac

SEQ ID NO: 498 - DNA, 66 bp, Artificial Sequence
  Synthetic
ttgcaccatccatctcagcctccagagctcgttggaactgctctcattttggagggtaatcacaac

SEQ ID NO: 499 - DNA, 66 bp, Artificial Sequence
  Synthetic
tttgcaccatccatctcagcctccagagctgttggaactgctctcattttggagggtaatcacaac

SEQ ID NO: 500 - DNA, 66 bp, Artificial Sequence
  Synthetic
ctttgcaccatccatctcagcctccagagcgttggaactgctctcattttggagggtaatcacaac

SEQ ID NO: 501 - DNA, 66 bp, Artificial Sequence
  Synthetic
cctttgcaccatccatctcagcctccagaggttggaactgctctcattttggagggtaatcacaac

SEQ ID NO: 502 - DNA, 66 bp, Artificial Sequence
  Synthetic
ccctttgcaccatccatctcagcctccagagttggaactgctctcattttggagggtaatcacaac

SEQ ID NO: 503 - DNA, 66 bp, Artificial Sequence
  Synthetic
tccctttgcaccatccatctcagcctccaggttggaactgctctcattttggagggtaatcacaac

SEQ ID NO: 504 - DNA, 66 bp, Artificial Sequence
  Synthetic
ttccctttgcaccatccatctcagcctccagttggaactgctctcattttggagggtaatcacaac

SEQ ID NO: 505 - DNA, 66 bp, Artificial Sequence
  Synthetic
cttccctttgcaccatccatctcagcctccgttggaactgctctcattttggagggtaatcacaac

SEQ ID NO: 506 - DNA, 66 bp, Artificial Sequence
  Synthetic
ccttccctttgcaccatccatctcagcctcgttggaactgctctcattttggagggtaatcacaac

SEQ ID NO: 507 - DNA, 66 bp, Artificial Sequence
  Synthetic
gccttccctttgcaccatccatctcagcctgttggaactgctctcattttggagggtaatcacaac

SEQ ID NO: 508 - DNA, 66 bp, Artificial Sequence
  Synthetic
agccttccctttgcaccatccatctcagccgttggaactgctctcattttggagggtaatcacaac

SEQ ID NO: 509 - DNA, 66 bp, Artificial Sequence
  Synthetic
cagccttccctttgcaccatccatctcagcgttggaactgctctcattttggagggtaatcacaac

SEQ ID NO: 510 - DNA, 66 bp, Artificial Sequence
  Synthetic
acagccttccctttgcaccatccatctcaggttggaactgctctcattttggagggtaatcacaac

SEQ ID NO: 511 - DNA, 66 bp, Artificial Sequence
  Synthetic
gacagccttccctttgcaccatccatctcagttggaactgctctcattttggagggtaatcacaac

SEQ ID NO: 512 - DNA, 66 bp, Artificial Sequence
  Synthetic
ggacagccttccctttgcaccatccatctcgttggaactgctctcattttggagggtaatcacaac

SEQ ID NO: 513 - DNA, 66 bp, Artificial Sequence
  Synthetic
aggacagccttccctttgcaccatccatctgttggaactgctctcattttggagggtaatcacaac

SEQ ID NO: 514 - DNA, 66 bp, Artificial Sequence
  Synthetic
gaggacagccttccctttgcaccatccatcgttggaactgctctcattttggagggtaatcacaac

SEQ ID NO: 515 - DNA, 66 bp, Artificial Sequence
  Synthetic
agaggacagccttccctttgcaccatccatgttggaactgctctcattttggagggtaatcacaac

SEQ ID NO: 516 - DNA, 66 bp, Artificial Sequence
  Synthetic
cagaggacagccttccctttgcaccatccagttggaactgctctcattttggagggtaatcacaac

SEQ ID NO: 517 - DNA, 66 bp, Artificial Sequence
  Synthetic
tgttgagaggttggcccctgaatatgtactgttggaactgctctcattttggagggtaatcacaac

SEQ ID NO: 518 - DNA, 66 bp, Artificial Sequence
  Synthetic
ttgttgagaggttggcccctgaatatgtacgttggaactgctctcattttggagggtaatcacaac

SEQ ID NO: 519 - DNA, 66 bp, Artificial Sequence
  Synthetic
attgttgagaggttggcccctgaatatgtagttggaactgctctcattttggagggtaatcacaac

SEQ ID NO: 520 - DNA, 66 bp, Artificial Sequence
  Synthetic
cattgttgagaggttggcccctgaatatgtgttggaactgctctcattttggagggtaatcacaac

SEQ ID NO: 521 - DNA, 66 bp, Artificial Sequence
  Synthetic
tcattgttgagaggttggcccctgaatatggttggaactgctctcattttggagggtaatcacaac

SEQ ID NO: 522 - DNA, 66 bp, Artificial Sequence
  Synthetic
gtcattgttgagaggttggcccctgaatatgttggaactgctctcattttggagggtaatcacaac

SEQ ID NO: 523 - DNA, 66 bp, Artificial Sequence
  Synthetic
cgtcattgttgagaggttggcccctgaatagttggaactgctctcattttggagggtaatcacaac

SEQ ID NO: 524 - DNA, 66 bp, Artificial Sequence
  Synthetic
tcgtcattgttgagaggttggcccctgaatgttggaactgctctcattttggagggtaatcacaac

SEQ ID NO: 525 - DNA, 66 bp, Artificial Sequence
  Synthetic
ttcgtcattgttgagaggttggcccctgaagttggaactgctctcattttggagggtaatcacaac

SEQ ID NO: 526 - DNA, 66 bp, Artificial Sequence
  Synthetic
cttcgtcattgttgagaggttggcccctgagttggaactgctctcattttggagggtaatcacaac

SEQ ID NO: 527 - DNA, 66 bp, Artificial Sequence
  Synthetic
tcttcgtcattgttgagaggttggcccctggttggaactgctctcattttggagggtaatcacaac

SEQ ID NO: 528 - DNA, 66 bp, Artificial Sequence
  Synthetic
gtcttcgtcattgttgagaggttggcccctgttggaactgctctcattttggagggtaatcacaac

SEQ ID NO: 529 - DNA, 66 bp, Artificial Sequence
  Synthetic
ggtcttcgtcattgttgagaggttggccccgttggaactgctctcattttggagggtaatcacaac

SEQ ID NO: 530 - DNA, 66 bp, Artificial Sequence
  Synthetic
tggtcttcgtcattgttgagaggttggcccgttggaactgctctcattttggagggtaatcacaac

SEQ ID NO: 531 - DNA, 66 bp, Artificial Sequence
  Synthetic
atggtcttcgtcattgttgagaggttggccgttggaactgctctcattttggagggtaatcacaac

SEQ ID NO: 532 - DNA, 66 bp, Artificial Sequence
  Synthetic
catggtcttcgtcattgttgagaggttggcgttggaactgctctcattttggagggtaatcacaac

SEQ ID NO: 533 - DNA, 66 bp, Artificial Sequence
  Synthetic
gcatggtcttcgtcattgttgagaggttgggttggaactgctctcattttggagggtaatcacaac

SEQ ID NO: 534 - DNA, 66 bp, Artificial Sequence
  Synthetic
agcatggtcttcgtcattgttgagaggttggttggaactgctctcattttggagggtaatcacaac

SEQ ID NO: 535 - DNA, 66 bp, Artificial Sequence
  Synthetic
gagcatggtcttcgtcattgttgagaggttgttggaactgctctcattttggagggtaatcacaac

SEQ ID NO: 536 - DNA, 66 bp, Artificial Sequence
  Synthetic
tgagcatggtcttcgtcattgttgagaggtgttggaactgctctcattttggagggtaatcacaac

SEQ ID NO: 537 - DNA, 66 bp, Artificial Sequence
  Synthetic
agtgagcatggtcttcgtcattgttgagaggttggaactgctctcattttggagggtaatcacaac

SEQ ID NO: 538 - DNA, 66 bp, Artificial Sequence
  Synthetic
ccagtgagcatggtcttcgtcattgttgaggttggaactgctctcattttggagggtaatcacaac

SEQ ID NO: 539 - DNA, 66 bp, Artificial Sequence
  Synthetic
gtccagtgagcatggtcttcgtcattgttggttggaactgctctcattttggagggtaatcacaac

SEQ ID NO: 540 - DNA, 66 bp, Artificial Sequence
  Synthetic
ctgtccagtgagcatggtcttcgtcattgtgttggaactgctctcattttggagggtaatcacaac

SEQ ID NO: 541 - DNA, 66 bp, Artificial Sequence
  Synthetic
ttctgtccagtgagcatggtcttcgtcattgttggaactgctctcattttggagggtaatcacaac

SEQ ID NO: 542 - DNA, 66 bp, Artificial Sequence
  Synthetic
gcttctgtccagtgagcatggtcttcgtcagttggaactgctctcattttggagggtaatcacaac

SEQ ID NO: 543 - DNA, 66 bp, Artificial Sequence
  Synthetic
ttgcttctgtccagtgagcatggtcttcgtgttggaactgctctcattttggagggtaatcacaac

SEQ ID NO: 544 - DNA, 66 bp, Artificial Sequence
  Synthetic
ttttgcttctgtccagtgagcatggtcttcgttggaactgctctcattttggagggtaatcacaac

SEQ ID NO: 545 - DNA, 66 bp, Artificial Sequence
  Synthetic
atttttgcttctgtccagtgagcatggtctgttggaactgctctcattttggagggtaatcacaac

SEQ ID NO: 546 - DNA, 66 bp, Artificial Sequence
  Synthetic
gcatttttgcttctgtccagtgagcatggtgttggaactgctctcattttggagggtaatcacaac

SEQ ID NO: 547 - DNA, 66 bp, Artificial Sequence
  Synthetic
cagcatttttgcttctgtccagtgagcatggttggaactgctctcattttggagggtaatcacaac

SEQ ID NO: 548 - DNA, 66 bp, Artificial Sequence
  Synthetic
agcagcatttttgcttctgtccagtgagcagttggaactgctctcattttggagggtaatcacaac

SEQ ID NO: 549 - DNA, 66 bp, Artificial Sequence
  Synthetic
ccagcagcatttttgcttctgtccagtgaggttggaactgctctcattttggagggtaatcacaac

SEQ ID NO: 550 - DNA, 66 bp, Artificial Sequence
  Synthetic
gtccagcagcatttttgcttctgtccagtggttggaactgctctcattttggagggtaatcacaac

SEQ ID NO: 551 - DNA, 66 bp, Artificial Sequence
  Synthetic
ttgtccagcagcatttttgcttctgtccaggttggaactgctctcattttggagggtaatcacaac

SEQ ID NO: 552 - DNA, 66 bp, Artificial Sequence
  Synthetic
tgttgtccagcagcatttttgcttctgtccgttggaactgctctcattttggagggtaatcacaac

SEQ ID NO: 553 - DNA, 66 bp, Artificial Sequence
  Synthetic
gatgttgtccagcagcatttttgcttctgtgttggaactgctctcattttggagggtaatcacaac

SEQ ID NO: 554 - DNA, 66 bp, Artificial Sequence
  Synthetic
ttgatgttgtccagcagcatttttgcttctgttggaactgctctcattttggagggtaatcacaac

SEQ ID NO: 555 - DNA, 66 bp, Artificial Sequence
  Synthetic
tgttgatgttgtccagcagcatttttgcttgttggaactgctctcattttggagggtaatcacaac

SEQ ID NO: 556 - DNA, 66 bp, Artificial Sequence
  Synthetic
tgtgttgatgttgtccagcagcatttttgcgttggaactgctctcattttggagggtaatcacaac

SEQ ID NO: 557 - DNA, 66 bp, Artificial Sequence
  Synthetic
ggtgtgttgatgttgtccagcagcatttttgttggaactgctctcattttggagggtaatcacaac

SEQ ID NO: 558 - DNA, 66 bp, Artificial Sequence
  Synthetic
ctggtgtgttgatgttgtccagcagcatttgttggaactgctctcattttggagggtaatcacaac

SEQ ID NO: 559 - DNA, 66 bp, Artificial Sequence
  Synthetic
ttctggtgtgttgatgttgtccagcagcatgttggaactgctctcattttggagggtaatcacaac

SEQ ID NO: 560 - DNA, 66 bp, Artificial Sequence
  Synthetic
ccttctggtgtgttgatgttgtccagcagcgttggaactgctctcattttggagggtaatcacaac

SEQ ID NO: 561 - DNA, 66 bp, Artificial Sequence
  Synthetic
tcccttctggtgtgttgatgttgtccagcagttggaactgctctcattttggagggtaatcacaac

SEQ ID NO: 562 - DNA, 66 bp, Artificial Sequence
  Synthetic
aatcccttctggtgtgttgatgttgtccaggttggaactgctctcattttggagggtaatcacaac

SEQ ID NO: 563 - DNA, 66 bp, Artificial Sequence
  Synthetic
ataatcccttctggtgtgttgatgttgtccgttggaactgctctcattttggagggtaatcacaac

SEQ ID NO: 564 - DNA, 66 bp, Artificial Sequence
  Synthetic
gtataatcccttctggtgtgttgatgttgtgttggaactgctctcattttggagggtaatcacaac

SEQ ID NO: 565 - DNA, 66 bp, Artificial Sequence
  Synthetic
tggtataatcccttctggtgtgttgatgttgttggaactgctctcattttggagggtaatcacaac

SEQ ID NO: 566 - DNA, 66 bp, Artificial Sequence
  Synthetic
gctggtataatcccttctggtgtgttgatggttggaactgctctcattttggagggtaatcacaac

SEQ ID NO: 567 - DNA, 66 bp, Artificial Sequence
  Synthetic
gagctggtataatcccttctggtgtgttgagttggaactgctctcattttggagggtaatcacaac

SEQ ID NO: 568 - DNA, 66 bp, Artificial Sequence
  Synthetic
gagagctggtataatcccttctggtgtgttgttggaactgctctcattttggagggtaatcacaac

SEQ ID NO: 569 - DNA, 66 bp, Artificial Sequence
  Synthetic
aagagagctggtataatcccttctggtgtggttggaactgctctcattttggagggtaatcacaac

SEQ ID NO: 570 - DNA, 66 bp, Artificial Sequence
  Synthetic
caaagagagctggtataatcccttctggtggttggaactgctctcattttggagggtaatcacaac

SEQ ID NO: 571 - DNA, 66 bp, Artificial Sequence
  Synthetic
ttcaaagagagctggtataatcccttctgggttggaactgctctcattttggagggtaatcacaac

SEQ ID NO: 572 - DNA, 66 bp, Artificial Sequence
  Synthetic
ggttcaaagagagctggtataatcccttctgttggaactgctctcattttggagggtaatcacaac

SEQ ID NO: 573 - DNA, 66 bp, Artificial Sequence
  Synthetic
ctggttcaaagagagctggtataatcccttgttggaactgctctcattttggagggtaatcacaac

SEQ ID NO: 574 - DNA, 66 bp, Artificial Sequence
  Synthetic
ttctggttcaaagagagctggtataatcccgttggaactgctctcattttggagggtaatcacaac

SEQ ID NO: 575 - DNA, 66 bp, Artificial Sequence
  Synthetic
ctttctggttcaaagagagctggtataatcgttggaactgctctcattttggagggtaatcacaac

SEQ ID NO: 576 - DNA, 66 bp, Artificial Sequence
  Synthetic
ccctttctggttcaaagagagctggtataagttggaactgctctcattttggagggtaatcacaac

SEQ ID NO: 577 - DNA, 66 bp, Artificial Sequence
  Synthetic
ctccctttctggttcaaagagagctggtatgttggaactgctctcattttggagggtaatcacaac

SEQ ID NO: 578 - DNA, 66 bp, Artificial Sequence
  Synthetic
ttctccctttctggttcaaagagagctggtgttggaactgctctcattttggagggtaatcacaac

SEQ ID NO: 579 - DNA, 66 bp, Artificial Sequence
  Synthetic
acttctccctttctggttcaaagagagctggttggaactgctctcattttggagggtaatcacaac

SEQ ID NO: 580 - DNA, 66 bp, Artificial Sequence
  Synthetic
tgacttctccctttctggttcaaagagagcgttggaactgctctcattttggagggtaatcacaac

SEQ ID NO: 581 - DNA, 66 bp, Artificial Sequence
  Synthetic
gctgacttctccctttctggttcaaagagagttggaactgctctcattttggagggtaatcacaac

SEQ ID NO: 582 - DNA, 66 bp, Artificial Sequence
  Synthetic
ggctgacttctccctttctggttcaaagaggttggaactgctctcattttggagggtaatcacaac

SEQ ID NO: 583 - DNA, 66 bp, Artificial Sequence
  Synthetic
cggctgacttctccctttctggttcaaagagttggaactgctctcattttggagggtaatcacaac

SEQ ID NO: 584 - DNA, 66 bp, Artificial Sequence
  Synthetic
gcggctgacttctccctttctggttcaaaggttggaactgctctcattttggagggtaatcacaac

SEQ ID NO: 585 - DNA, 66 bp, Artificial Sequence
  Synthetic
ggcggctgacttctccctttctggttcaaagttggaactgctctcattttggagggtaatcacaac

SEQ ID NO: 586 - DNA, 66 bp, Artificial Sequence
  Synthetic
tggcggctgacttctccctttctggttcaagttggaactgctctcattttggagggtaatcacaac

SEQ ID NO: 587 - DNA, 66 bp, Artificial Sequence
  Synthetic
atggcggctgacttctccctttctggttcagttggaactgctctcattttggagggtaatcacaac

SEQ ID NO: 588 - DNA, 66 bp, Artificial Sequence
  Synthetic
tatggcggctgacttctccctttctggttcgttggaactgctctcattttggagggtaatcacaac

SEQ ID NO: 589 - DNA, 66 bp, Artificial Sequence
  Synthetic
ctatggcggctgacttctccctttctggttgttggaactgctctcattttggagggtaatcacaac

SEQ ID NO: 590 - DNA, 66 bp, Artificial Sequence
  Synthetic
tctatggcggctgacttctccctttctggtgttggaactgctctcattttggagggtaatcacaac

SEQ ID NO: 591 - DNA, 66 bp, Artificial Sequence
  Synthetic
gtctatggcggctgacttctccctttctgggttggaactgctctcattttggagggtaatcacaac

SEQ ID NO: 592 - DNA, 66 bp, Artificial Sequence
  Synthetic
cgtctatggcggctgacttctccctttctggttggaactgctctcattttggagggtaatcacaac

SEQ ID NO: 593 - DNA, 66 bp, Artificial Sequence
  Synthetic
ccgtctatggcggctgacttctccctttctgttggaactgctctcattttggagggtaatcacaac

SEQ ID NO: 594 - DNA, 66 bp, Artificial Sequence
  Synthetic
accgtctatggcggctgacttctccctttcgttggaactgctctcattttggagggtaatcacaac

SEQ ID NO: 595 - DNA, 66 bp, Artificial Sequence
  Synthetic
caccgtctatggcggctgacttctccctttgttggaactgctctcattttggagggtaatcacaac

SEQ ID NO: 596 - DNA, 66 bp, Artificial Sequence
  Synthetic
tcaccgtctatggcggctgacttctcccttgttggaactgctctcattttggagggtaatcacaac

SEQ ID NO: 597 - DNA, 66 bp, Artificial Sequence
  Synthetic
ttcaccgtctatggcggctgacttctccctgttggaactgctctcattttggagggtaatcacaac

SEQ ID NO: 598 - DNA, 66 bp, Artificial Sequence
  Synthetic
attcaccgtctatggcggctgacttctcccgttggaactgctctcattttggagggtaatcacaac

SEQ ID NO: 599 - DNA, 66 bp, Artificial Sequence
  Synthetic
tattcaccgtctatggcggctgacttctccgttggaactgctctcattttggagggtaatcacaac

SEQ ID NO: 600 - DNA, 66 bp, Artificial Sequence
  Synthetic
gtattcaccgtctatggcggctgacttctcgttggaactgctctcattttggagggtaatcacaac

SEQ ID NO: 601 - DNA, 66 bp, Artificial Sequence
  Synthetic
ggtattcaccgtctatggcggctgacttctgttggaactgctctcattttggagggtaatcacaac

SEQ ID NO: 602 - DNA, 66 bp, Artificial Sequence
  Synthetic
cggtattcaccgtctatggcggctgacttcgttggaactgctctcattttggagggtaatcacaac

SEQ ID NO: 603 - DNA, 66 bp, Artificial Sequence
  Synthetic
gcggtattcaccgtctatggcggctgacttgttggaactgctctcattttggagggtaatcacaac

SEQ ID NO: 604 - DNA, 66 bp, Artificial Sequence
  Synthetic
ggcggtattcaccgtctatggcggctgactgttggaactgctctcattttggagggtaatcacaac

SEQ ID NO: 605 - DNA, 66 bp, Artificial Sequence
  Synthetic
aggcggtattcaccgtctatggcggctgacgttggaactgctctcattttggagggtaatcacaac

SEQ ID NO: 606 - DNA, 66 bp, Artificial Sequence
  Synthetic
caggcggtattcaccgtctatggcggctgagttggaactgctctcattttggagggtaatcacaac

SEQ ID NO: 607 - DNA, 66 bp, Artificial Sequence
  Synthetic
tcaggcggtattcaccgtctatggcggctggttggaactgctctcattttggagggtaatcacaac

SEQ ID NO: 608 - DNA, 66 bp, Artificial Sequence
  Synthetic
ttcaggcggtattcaccgtctatggcggctgttggaactgctctcattttggagggtaatcacaac

SEQ ID NO: 609 - DNA, 66 bp, Artificial Sequence
  Synthetic
cttcaggcggtattcaccgtctatggcggcgttggaactgctctcattttggagggtaatcacaac

SEQ ID NO: 610 - DNA, 66 bp, Artificial Sequence
  Synthetic
ccttcaggcggtattcaccgtctatggcgggttggaactgctctcattttggagggtaatcacaac

SEQ ID NO: 611 - DNA, 66 bp, Artificial Sequence
  Synthetic
cccttcaggcggtattcaccgtctatggcggttggaactgctctcattttggagggtaatcacaac

SEQ ID NO: 612 - DNA, 66 bp, Artificial Sequence
  Synthetic
attaatttaacagtatcaccatcaatcgctgttggaactgctctcattttggagggtaatcacaac

SEQ ID NO: 613 - DNA, 66 bp, Artificial Sequence
  Synthetic
cattaatttaacagtatcaccatcaatcgcgttggaactgctctcattttggagggtaatcacaac

SEQ ID NO: 614 - DNA, 66 bp, Artificial Sequence
  Synthetic
acattaatttaacagtatcaccatcaatcggttggaactgctctcattttggagggtaatcacaac

SEQ ID NO: 615 - DNA, 66 bp, Artificial Sequence
  Synthetic
tacattaatttaacagtatcaccatcaatcgttggaactgctctcattttggagggtaatcacaac

SEQ ID NO: 616 - DNA, 66 bp, Artificial Sequence
  Synthetic
gtacattaatttaacagtatcaccatcaatgttggaactgctctcattttggagggtaatcacaac

SEQ ID NO: 617 - DNA, 66 bp, Artificial Sequence
  Synthetic
tgtacattaatttaacagtatcaccatcaagttggaactgctctcattttggagggtaatcacaac

SEQ ID NO: 618 - DNA, 66 bp, Artificial Sequence
  Synthetic
ttgtacattaatttaacagtatcaccatcagttggaactgctctcattttggagggtaatcacaac

SEQ ID NO: 619 - DNA, 66 bp, Artificial Sequence
  Synthetic
tttgtacattaatttaacagtatcaccatcgttggaactgctctcattttggagggtaatcacaac

SEQ ID NO: 620 - DNA, 66 bp, Artificial Sequence
  Synthetic
ctttgtacattaatttaacagtatcaccatgttggaactgctctcattttggagggtaatcacaac

SEQ ID NO: 621 - DNA, 66 bp, Artificial Sequence
  Synthetic
cctttgtacattaatttaacagtatcaccagttggaactgctctcattttggagggtaatcacaac

SEQ ID NO: 622 - DNA, 66 bp, Artificial Sequence
  Synthetic
acctttgtacattaatttaacagtatcaccgttggaactgctctcattttggagggtaatcacaac

SEQ ID NO: 623 - DNA, 66 bp, Artificial Sequence
  Synthetic
gacctttgtacattaatttaacagtatcacgttggaactgctctcattttggagggtaatcacaac

SEQ ID NO: 624 - DNA, 66 bp, Artificial Sequence
  Synthetic
tgacctttgtacattaatttaacagtatcagttggaactgctctcattttggagggtaatcacaac

SEQ ID NO: 625 - DNA, 66 bp, Artificial Sequence
  Synthetic
ttgacctttgtacattaatttaacagtatcgttggaactgctctcattttggagggtaatcacaac

SEQ ID NO: 626 - DNA, 66 bp, Artificial Sequence
  Synthetic
gttgacctttgtacattaatttaacagtatgttggaactgctctcattttggagggtaatcacaac

SEQ ID NO: 627 - DNA, 66 bp, Artificial Sequence
  Synthetic
ggttgacctttgtacattaatttaacagtagttggaactgctctcattttggagggtaatcacaac

SEQ ID NO: 628 - DNA, 66 bp, Artificial Sequence
  Synthetic
tggttgacctttgtacattaatttaacagtgttggaactgctctcattttggagggtaatcacaac

SEQ ID NO: 629 - DNA, 66 bp, Artificial Sequence
  Synthetic
ttggttgacctttgtacattaatttaacaggttggaactgctctcattttggagggtaatcacaac

SEQ ID NO: 630 - DNA, 66 bp, Artificial Sequence
  Synthetic
attggttgacctttgtacattaatttaacagttggaactgctctcattttggagggtaatcacaac

SEQ ID NO: 631 - DNA, 66 bp, Artificial Sequence
  Synthetic
cattggttgacctttgtacattaatttaacgttggaactgctctcattttggagggtaatcacaac

SEQ ID NO: 632 - DNA, 66 bp, Artificial Sequence
  Synthetic
gtcattggttgacctttgtacattaatttagttggaactgctctcattttggagggtaatcacaac

SEQ ID NO: 633 - DNA, 66 bp, Artificial Sequence
  Synthetic
atgtcattggttgacctttgtacattaattgttggaactgctctcattttggagggtaatcacaac

SEQ ID NO: 634 - DNA, 66 bp, Artificial Sequence
  Synthetic
gaatgtcattggttgacctttgtacattaagttggaactgctctcattttggagggtaatcacaac

SEQ ID NO: 635 - DNA, 66 bp, Artificial Sequence
  Synthetic
ctgaatgtcattggttgacctttgtacattgttggaactgctctcattttggagggtaatcacaac

SEQ ID NO: 636 - DNA, 66 bp, Artificial Sequence
  Synthetic
gtctgaatgtcattggttgacctttgtacagttggaactgctctcattttggagggtaatcacaac

SEQ ID NO: 637 - DNA, 66 bp, Artificial Sequence
  Synthetic
tagtctgaatgtcattggttgacctttgtagttggaactgctctcattttggagggtaatcacaac

SEQ ID NO: 638 - DNA, 66 bp, Artificial Sequence
  Synthetic
aatagtctgaatgtcattggttgacctttggttggaactgctctcattttggagggtaatcacaac

SEQ ID NO: 639 - DNA, 66 bp, Artificial Sequence
  Synthetic
ataatagtctgaatgtcattggttgaccttgttggaactgctctcattttggagggtaatcacaac

SEQ ID NO: 640 - DNA, 66 bp, Artificial Sequence
  Synthetic
caataatagtctgaatgtcattggttgaccgttggaactgctctcattttggagggtaatcacaac

SEQ ID NO: 641 - DNA, 66 bp, Artificial Sequence
  Synthetic
accaataatagtctgaatgtcattggttgagttggaactgctctcattttggagggtaatcacaac

SEQ ID NO: 642 - DNA, 66 bp, Artificial Sequence
  Synthetic
caaccaataatagtctgaatgtcattggttgttggaactgctctcattttggagggtaatcacaac

SEQ ID NO: 643 - DNA, 66 bp, Artificial Sequence
  Synthetic
atcaaccaataatagtctgaatgtcattgggttggaactgctctcattttggagggtaatcacaac

SEQ ID NO: 644 - DNA, 66 bp, Artificial Sequence
  Synthetic
gtatcaaccaataatagtctgaatgtcattgttggaactgctctcattttggagggtaatcacaac

SEQ ID NO: 645 - DNA, 66 bp, Artificial Sequence
  Synthetic
gtgtatcaaccaataatagtctgaatgtcagttggaactgctctcattttggagggtaatcacaac

SEQ ID NO: 646 - DNA, 66 bp, Artificial Sequence
  Synthetic
aggtgtatcaaccaataatagtctgaatgtgttggaactgctctcattttggagggtaatcacaac

SEQ ID NO: 647 - DNA, 66 bp, Artificial Sequence
  Synthetic
tcaggtgtatcaaccaataatagtctgaatgttggaactgctctcattttggagggtaatcacaac

SEQ ID NO: 648 - DNA, 66 bp, Artificial Sequence
  Synthetic
tttcaggtgtatcaaccaataatagtctgagttggaactgctctcattttggagggtaatcacaac

SEQ ID NO: 649 - DNA, 66 bp, Artificial Sequence
  Synthetic
tgtttcaggtgtatcaaccaataatagtctgttggaactgctctcattttggagggtaatcacaac

SEQ ID NO: 650 - DNA, 66 bp, Artificial Sequence
  Synthetic
tttgtttcaggtgtatcaaccaataatagtgttggaactgctctcattttggagggtaatcacaac

SEQ ID NO: 651 - DNA, 66 bp, Artificial Sequence
  Synthetic
gctttgtttcaggtgtatcaaccaataatagttggaactgctctcattttggagggtaatcacaac

SEQ ID NO: 652 - DNA, 66 bp, Artificial Sequence
  Synthetic
atgctttgtttcaggtgtatcaaccaataagttggaactgctctcattttggagggtaatcacaac

SEQ ID NO: 653 - DNA, 66 bp, Artificial Sequence
  Synthetic
ggatgctttgtttcaggtgtatcaaccaatgttggaactgctctcattttggagggtaatcacaac

SEQ ID NO: 654 - DNA, 66 bp, Artificial Sequence
  Synthetic
taggatgctttgtttcaggtgtatcaaccagttggaactgctctcattttggagggtaatcacaac

SEQ ID NO: 655 - DNA, 66 bp, Artificial Sequence
  Synthetic
tttaggatgctttgtttcaggtgtatcaacgttggaactgctctcattttggagggtaatcacaac

SEQ ID NO: 656 - DNA, 66 bp, Artificial Sequence
  Synthetic
tttttaggatgctttgtttcaggtgtatcagttggaactgctctcattttggagggtaatcacaac

SEQ ID NO: 657 - DNA, 66 bp, Artificial Sequence
  Synthetic
cttttttaggatgctttgtttcaggtgtatgttggaactgctctcattttggagggtaatcacaac

SEQ ID NO: 658 - DNA, 66 bp, Artificial Sequence
  Synthetic
accttttttaggatgctttgtttcaggtgtgttggaactgctctcattttggagggtaatcacaac

SEQ ID NO: 659 - DNA, 66 bp, Artificial Sequence
  Synthetic
acaccttttttaggatgctttgtttcaggtgttggaactgctctcattttggagggtaatcacaac

SEQ ID NO: 660 - DNA, 66 bp, Artificial Sequence
  Synthetic
ctacaccttttttaggatgctttgtttcaggttggaactgctctcattttggagggtaatcacaac

SEQ ID NO: 661 - DNA, 66 bp, Artificial Sequence
  Synthetic
ctctacaccttttttaggatgctttgtttcgttggaactgctctcattttggagggtaatcacaac

SEQ ID NO: 662 - DNA, 66 bp, Artificial Sequence
  Synthetic
ttctctacaccttttttaggatgctttgttgttggaactgctctcattttggagggtaatcacaac

SEQ ID NO: 663 - DNA, 66 bp, Artificial Sequence
  Synthetic
atttctctacaccttttttaggatgctttggttggaactgctctcattttggagggtaatcacaac

SEQ ID NO: 664 - DNA, 66 bp, Artificial Sequence
  Synthetic
atatttctctacaccttttttaggatgcttgttggaactgctctcattttggagggtaatcacaac

SEQ ID NO: 665 - DNA, 66 bp, Artificial Sequence
  Synthetic
ccatatttctctacaccttttttaggatgcgttggaactgctctcattttggagggtaatcacaac

SEQ ID NO: 666 - DNA, 66 bp, Artificial Sequence
  Synthetic
gaccatatttctctacaccttttttaggatgttggaactgctctcattttggagggtaatcacaac

SEQ ID NO: 667 - DNA, 66 bp, Artificial Sequence
  Synthetic
aggaccatatttctctacaccttttttagggttggaactgctctcattttggagggtaatcacaac

SEQ ID NO: 668 - DNA, 66 bp, Artificial Sequence
  Synthetic
tcaggaccatatttctctacaccttttttagttggaactgctctcattttggagggtaatcacaac

SEQ ID NO: 669 - DNA, 66 bp, Artificial Sequence
  Synthetic
cttcaggaccatatttctctacacctttttgttggaactgctctcattttggagggtaatcacaac

SEQ ID NO: 670 - DNA, 66 bp, Artificial Sequence
  Synthetic
tgcttcaggaccatatttctctacacctttgttggaactgctctcattttggagggtaatcacaac

SEQ ID NO: 671 - DNA, 66 bp, Artificial Sequence
  Synthetic
cttgcttcaggaccatatttctctacacctgttggaactgctctcattttggagggtaatcacaac

SEQ ID NO: 672 - DNA, 66 bp, Artificial Sequence
  Synthetic
cacttgcttcaggaccatatttctctacacgttggaactgctctcattttggagggtaatcacaac

SEQ ID NO: 673 - DNA, 66 bp, Artificial Sequence
  Synthetic
tgcacttgcttcaggaccatatttctctacgttggaactgctctcattttggagggtaatcacaac

SEQ ID NO: 674 - DNA, 66 bp, Artificial Sequence
  Synthetic
aatgcacttgcttcaggaccatatttctctgttggaactgctctcattttggagggtaatcacaac

SEQ ID NO: 675 - DNA, 66 bp, Artificial Sequence
  Synthetic
taaatgcacttgcttcaggaccatatttctgttggaactgctctcattttggagggtaatcacaac

SEQ ID NO: 676 - DNA, 66 bp, Artificial Sequence
  Synthetic
cgtaaatgcacttgcttcaggaccatatttgttggaactgctctcattttggagggtaatcacaac

SEQ ID NO: 677 - DNA, 66 bp, Artificial Sequence
  Synthetic
tcgtaaatgcacttgcttcaggaccatattgttggaactgctctcattttggagggtaatcacaac

SEQ ID NO: 678 - DNA, 66 bp, Artificial Sequence
  Synthetic
ttcgtaaatgcacttgcttcaggaccatatgttggaactgctctcattttggagggtaatcacaac

SEQ ID NO: 679 - DNA, 66 bp, Artificial Sequence
  Synthetic
tttcgtaaatgcacttgcttcaggaccatagttggaactgctctcattttggagggtaatcacaac

SEQ ID NO: 680 - DNA, 66 bp, Artificial Sequence
  Synthetic
ttttcgtaaatgcacttgcttcaggaccatgttggaactgctctcattttggagggtaatcacaac

SEQ ID NO: 681 - DNA, 66 bp, Artificial Sequence
  Synthetic
tttttcgtaaatgcacttgcttcaggaccagttggaactgctctcattttggagggtaatcacaac

SEQ ID NO: 682 - DNA, 66 bp, Artificial Sequence
  Synthetic
ctttttcgtaaatgcacttgcttcaggaccgttggaactgctctcattttggagggtaatcacaac

SEQ ID NO: 683 - DNA, 66 bp, Artificial Sequence
  Synthetic
tctttttcgtaaatgcacttgcttcaggacgttggaactgctctcattttggagggtaatcacaac

SEQ ID NO: 684 - DNA, 66 bp, Artificial Sequence
  Synthetic
atctttttcgtaaatgcacttgcttcaggagttggaactgctctcattttggagggtaatcacaac

SEQ ID NO: 685 - DNA, 66 bp, Artificial Sequence
  Synthetic
catctttttcgtaaatgcacttgcttcagggttggaactgctctcattttggagggtaatcacaac

SEQ ID NO: 686 - DNA, 66 bp, Artificial Sequence
  Synthetic
ccatctttttcgtaaatgcacttgcttcaggttggaactgctctcattttggagggtaatcacaac

SEQ ID NO: 687 - DNA, 66 bp, Artificial Sequence
  Synthetic
accatctttttcgtaaatgcacttgcttcagttggaactgctctcattttggagggtaatcacaac

SEQ ID NO: 688 - DNA, 66 bp, Artificial Sequence
  Synthetic
taccatctttttcgtaaatgcacttgcttcgttggaactgctctcattttggagggtaatcacaac

SEQ ID NO: 689 - DNA, 66 bp, Artificial Sequence
  Synthetic
ctaccatctttttcgtaaatgcacttgcttgttggaactgctctcattttggagggtaatcacaac

SEQ ID NO: 690 - DNA, 66 bp, Artificial Sequence
  Synthetic
tctaccatctttttcgtaaatgcacttgctgttggaactgctctcattttggagggtaatcacaac

SEQ ID NO: 691 - DNA, 66 bp, Artificial Sequence
  Synthetic
ttctaccatctttttcgtaaatgcacttgcgttggaactgctctcattttggagggtaatcacaac

SEQ ID NO: 692 - DNA, 66 bp, Artificial Sequence
  Synthetic
tttctaccatctttttcgtaaatgcacttggttggaactgctctcattttggagggtaatcacaac

SEQ ID NO: 693 - DNA, 66 bp, Artificial Sequence
  Synthetic
ttttctaccatctttttcgtaaatgcacttgttggaactgctctcattttggagggtaatcacaac

SEQ ID NO: 694 - DNA, 66 bp, Artificial Sequence
  Synthetic
attttctaccatctttttcgtaaatgcactgttggaactgctctcattttggagggtaatcacaac

SEQ ID NO: 695 - DNA, 66 bp, Artificial Sequence
  Synthetic
cattttctaccatctttttcgtaaatgcacgttggaactgctctcattttggagggtaatcacaac

SEQ ID NO: 696 - DNA, 66 bp, Artificial Sequence
  Synthetic
gcattttctaccatctttttcgtaaatgcagttggaactgctctcattttggagggtaatcacaac

SEQ ID NO: 697 - DNA, 66 bp, Artificial Sequence
  Synthetic
tgcattttctaccatctttttcgtaaatgcgttggaactgctctcattttggagggtaatcacaac

SEQ ID NO: 698 - DNA, 66 bp, Artificial Sequence
  Synthetic
ttgcattttctaccatctttttcgtaaatggttggaactgctctcattttggagggtaatcacaac

SEQ ID NO: 699 - DNA, 66 bp, Artificial Sequence
  Synthetic
tttgcattttctaccatctttttcgtaaatgttggaactgctctcattttggagggtaatcacaac

SEQ ID NO: 700 - DNA, 66 bp, Artificial Sequence
  Synthetic
ctttgcattttctaccatctttttcgtaaagttggaactgctctcattttggagggtaatcacaac

SEQ ID NO: 701 - DNA, 66 bp, Artificial Sequence
  Synthetic
tctttgcattttctaccatctttttcgtaagttggaactgctctcattttggagggtaatcacaac

SEQ ID NO: 702 - DNA, 66 bp, Artificial Sequence
  Synthetic
ttctttgcattttctaccatctttttcgtagttggaactgctctcattttggagggtaatcacaac

SEQ ID NO: 703 - DNA, 66 bp, Artificial Sequence
  Synthetic
tttctttgcattttctaccatctttttcgtgttggaactgctctcattttggagggtaatcacaac

SEQ ID NO: 704 - DNA, 66 bp, Artificial Sequence
  Synthetic
ttttctttgcattttctaccatctttttcggttggaactgctctcattttggagggtaatcacaac

SEQ ID NO: 705 - DNA, 66 bp, Artificial Sequence
  Synthetic
attttctttgcattttctaccatctttttcgttggaactgctctcattttggagggtaatcacaac

SEQ ID NO: 706 - DNA, 66 bp, Artificial Sequence
  Synthetic
aattttctttgcattttctaccatctttttgttggaactgctctcattttggagggtaatcacaac

SEQ ID NO: 707 - DNA, 66 bp, Artificial Sequence
  Synthetic
caattttctttgcattttctaccatcttttgttggaactgctctcattttggagggtaatcacaac

SEQ ID NO: 708 - DNA, 66 bp, Artificial Sequence
  Synthetic
atccccgggtaccgagctcgaattcactgggttggaactgctctcattttggagggtaatcacaac

SEQ ID NO: 709 - DNA, 66 bp, Artificial Sequence
  Synthetic
gatccccgggtaccgagctcgaattcactggttggaactgctctcattttggagggtaatcacaac

SEQ ID NO: 710 - DNA, 66 bp, Artificial Sequence
  Synthetic
ggatccccgggtaccgagctcgaattcactgttggaactgctctcattttggagggtaatcacaac

SEQ ID NO: 711 - DNA, 66 bp, Artificial Sequence
  Synthetic
agaggatccccgggtaccgagctcgaattcgttggaactgctctcattttggagggtaatcacaac

SEQ ID NO: 712 - DNA, 66 bp, Artificial Sequence
  Synthetic
ctagaggatccccgggtaccgagctcgaatgttggaactgctctcattttggagggtaatcacaac

SEQ ID NO: 713 - DNA, 66 bp, Artificial Sequence
  Synthetic
tttctagaggatccccgggtaccgagctcggttggaactgctctcattttggagggtaatcacaac

SEQ ID NO: 714 - DNA, 66 bp, Artificial Sequence
  Synthetic
atttctagaggatccccgggtaccgagctcgttggaactgctctcattttggagggtaatcacaac

SEQ ID NO: 715 - DNA, 66 bp, Artificial Sequence
  Synthetic
atatttctagaggatccccgggtaccgagcgttggaactgctctcattttggagggtaatcacaac

SEQ ID NO: 716 - DNA, 66 bp, Artificial Sequence
  Synthetic
catatttctagaggatccccgggtaccgaggttggaactgctctcattttggagggtaatcacaac

SEQ ID NO: 717 - DNA, 66 bp, Artificial Sequence
  Synthetic
atccatatttctagaggatccccgggtaccgttggaactgctctcattttggagggtaatcacaac

SEQ ID NO: 718 - DNA, 66 bp, Artificial Sequence
  Synthetic
aatccatatttctagaggatccccgggtacgttggaactgctctcattttggagggtaatcacaac

SEQ ID NO: 719 - DNA, 66 bp, Artificial Sequence
  Synthetic
taatccatatttctagaggatccccgggtagttggaactgctctcattttggagggtaatcacaac

SEQ ID NO: 720 - DNA, 66 bp, Artificial Sequence
  Synthetic
agtaatccatatttctagaggatccccggggttggaactgctctcattttggagggtaatcacaac

SEQ ID NO: 721 - DNA, 66 bp, Artificial Sequence
  Synthetic
aagtaatccatatttctagaggatccccgggttggaactgctctcattttggagggtaatcacaac

SEQ ID NO: 722 - DNA, 66 bp, Artificial Sequence
  Synthetic
tctaccaagtaatccatatttctagaggatgttggaactgctctcattttggagggtaatcacaac

SEQ ID NO: 723 - DNA, 66 bp, Artificial Sequence
  Synthetic
gttctaccaagtaatccatatttctagagggttggaactgctctcattttggagggtaatcacaac

SEQ ID NO: 724 - DNA, 66 bp, Artificial Sequence
  Synthetic
ctgttctaccaagtaatccatatttctagagttggaactgctctcattttggagggtaatcacaac

SEQ ID NO: 725 - DNA, 66 bp, Artificial Sequence
  Synthetic
ttgctgttctaccaagtaatccatatttctgttggaactgctctcattttggagggtaatcacaac

SEQ ID NO: 726 - DNA, 66 bp, Artificial Sequence
  Synthetic
gattgctgttctaccaagtaatccatatttgttggaactgctctcattttggagggtaatcacaac

SEQ ID NO: 727 - DNA, 66 bp, Artificial Sequence
  Synthetic
agattgctgttctaccaagtaatccatattgttggaactgctctcattttggagggtaatcacaac

SEQ ID NO: 728 - DNA, 66 bp, Artificial Sequence
  Synthetic
agtagattgctgttctaccaagtaatccatgttggaactgctctcattttggagggtaatcacaac

SEQ ID NO: 729 - DNA, 66 bp, Artificial Sequence
  Synthetic
gagtagattgctgttctaccaagtaatccagttggaactgctctcattttggagggtaatcacaac

SEQ ID NO: 730 - DNA, 66 bp, Artificial Sequence
  Synthetic
cgagtagattgctgttctaccaagtaatccgttggaactgctctcattttggagggtaatcacaac

SEQ ID NO: 731 - DNA, 66 bp, Artificial Sequence
  Synthetic
tcgagtagattgctgttctaccaagtaatcgttggaactgctctcattttggagggtaatcacaac

SEQ ID NO: 732 - DNA, 66 bp, Artificial Sequence
  Synthetic
ggtcgagtagattgctgttctaccaagtaagttggaactgctctcattttggagggtaatcacaac

SEQ ID NO: 733 - DNA, 66 bp, Artificial Sequence
  Synthetic
aggtcgagtagattgctgttctaccaagtagttggaactgctctcattttggagggtaatcacaac

SEQ ID NO: 734 - DNA, 66 bp, Artificial Sequence
  Synthetic
gcaggtcgagtagattgctgttctaccaaggttggaactgctctcattttggagggtaatcacaac

SEQ ID NO: 735 - DNA, 66 bp, Artificial Sequence
  Synthetic
tgcaggtcgagtagattgctgttctaccaagttggaactgctctcattttggagggtaatcacaac

SEQ ID NO: 736 - DNA, 66 bp, Artificial Sequence
  Synthetic
ctgcaggtcgagtagattgctgttctaccagttggaactgctctcattttggagggtaatcacaac

SEQ ID NO: 737 - DNA, 66 bp, Artificial Sequence
  Synthetic
cctgcaggtcgagtagattgctgttctaccgttggaactgctctcattttggagggtaatcacaac

SEQ ID NO: 738 - DNA, 66 bp, Artificial Sequence
  Synthetic
gcctgcaggtcgagtagattgctgttctacgttggaactgctctcattttggagggtaatcacaac

SEQ ID NO: 739 - DNA, 66 bp, Artificial Sequence
  Synthetic
tgcctgcaggtcgagtagattgctgttctagttggaactgctctcattttggagggtaatcacaac

SEQ ID NO: 740 - DNA, 66 bp, Artificial Sequence
  Synthetic
catgcctgcaggtcgagtagattgctgttcgttggaactgctctcattttggagggtaatcacaac

SEQ ID NO: 741 - DNA, 66 bp, Artificial Sequence
  Synthetic
gcatgcctgcaggtcgagtagattgctgttgttggaactgctctcattttggagggtaatcacaac

SEQ ID NO: 742 - DNA, 66 bp, Artificial Sequence
  Synthetic
tgcatgcctgcaggtcgagtagattgctgtgttggaactgctctcattttggagggtaatcacaac

SEQ ID NO: 743 - DNA, 66 bp, Artificial Sequence
  Synthetic
cttgcatgcctgcaggtcgagtagattgctgttggaactgctctcattttggagggtaatcacaac

SEQ ID NO: 744 - DNA, 66 bp, Artificial Sequence
  Synthetic
gcttgcatgcctgcaggtcgagtagattgcgttggaactgctctcattttggagggtaatcacaac

SEQ ID NO: 745 - DNA, 66 bp, Artificial Sequence
  Synthetic
agcttgcatgcctgcaggtcgagtagattggttggaactgctctcattttggagggtaatcacaac

SEQ ID NO: 746 - DNA, 66 bp, Artificial Sequence
  Synthetic
aagcttgcatgcctgcaggtcgagtagattgttggaactgctctcattttggagggtaatcacaac

SEQ ID NO: 747 - DNA, 66 bp, Artificial Sequence
  Synthetic
caagcttgcatgcctgcaggtcgagtagatgttggaactgctctcattttggagggtaatcacaac

SEQ ID NO: 748 - DNA, 66 bp, Artificial Sequence
  Synthetic
ccaagcttgcatgcctgcaggtcgagtagagttggaactgctctcattttggagggtaatcacaac

SEQ ID NO: 749 - DNA, 66 bp, Artificial Sequence
  Synthetic
gccaagcttgcatgcctgcaggtcgagtaggttggaactgctctcattttggagggtaatcacaac

SEQ ID NO: 750 - DNA, 66 bp, Artificial Sequence
  Synthetic
cgccaagcttgcatgcctgcaggtcgagtagttggaactgctctcattttggagggtaatcacaac

SEQ ID NO: 751 - DNA, 66 bp, Artificial Sequence
  Synthetic
tacgccaagcttgcatgcctgcaggtcgaggttggaactgctctcattttggagggtaatcacaac

SEQ ID NO: 752 - DNA, 66 bp, Artificial Sequence
  Synthetic
ttacgccaagcttgcatgcctgcaggtcgagttggaactgctctcattttggagggtaatcacaac

SEQ ID NO: 753 - DNA, 66 bp, Artificial Sequence
  Synthetic
attacgccaagcttgcatgcctgcaggtcggttggaactgctctcattttggagggtaatcacaac

SEQ ID NO: 754 - DNA, 66 bp, Artificial Sequence
  Synthetic
gattacgccaagcttgcatgcctgcaggtcgttggaactgctctcattttggagggtaatcacaac

SEQ ID NO: 755 - DNA, 66 bp, Artificial Sequence
  Synthetic
tgattacgccaagcttgcatgcctgcaggtgttggaactgctctcattttggagggtaatcacaac

SEQ ID NO: 756 - DNA, 66 bp, Artificial Sequence
  Synthetic
atgattacgccaagcttgcatgcctgcagggttggaactgctctcattttggagggtaatcacaac

SEQ ID NO: 757 - DNA, 66 bp, Artificial Sequence
  Synthetic
catgattacgccaagcttgcatgcctgcaggttggaactgctctcattttggagggtaatcacaac

SEQ ID NO: 758 - DNA, 66 bp, Artificial Sequence
  Synthetic
accatgattacgccaagcttgcatgcctgcgttggaactgctctcattttggagggtaatcacaac

SEQ ID NO: 759 - DNA, 66 bp, Artificial Sequence
  Synthetic
gaccatgattacgccaagcttgcatgcctggttggaactgctctcattttggagggtaatcacaac

SEQ ID NO: 760 - DNA, 66 bp, Artificial Sequence
  Synthetic
tgaccatgattacgccaagcttgcatgcctgttggaactgctctcattttggagggtaatcacaac

SEQ ID NO: 761 - DNA, 66 bp, Artificial Sequence
  Synthetic
atgaccatgattacgccaagcttgcatgccgttggaactgctctcattttggagggtaatcacaac

SEQ ID NO: 762 - DNA, 66 bp, Artificial Sequence
  Synthetic
ctatgaccatgattacgccaagcttgcatggttggaactgctctcattttggagggtaatcacaac

SEQ ID NO: 763 - DNA, 66 bp, Artificial Sequence
  Synthetic
gctatgaccatgattacgccaagcttgcatgttggaactgctctcattttggagggtaatcacaac

SEQ ID NO: 764 - DNA, 66 bp, Artificial Sequence
  Synthetic
acagctatgaccatgattacgccaagcttggttggaactgctctcattttggagggtaatcacaac

SEQ ID NO: 765 - DNA, 66 bp, Artificial Sequence
  Synthetic
aacagctatgaccatgattacgccaagcttgttggaactgctctcattttggagggtaatcacaac

SEQ ID NO: 766 - DNA, 66 bp, Artificial Sequence
  Synthetic
aaacagctatgaccatgattacgccaagctgttggaactgctctcattttggagggtaatcacaac

SEQ ID NO: 767 - DNA, 66 bp, Artificial Sequence
  Synthetic
gaaacagctatgaccatgattacgccaagcgttggaactgctctcattttggagggtaatcacaac

SEQ ID NO: 768 - DNA, 66 bp, Artificial Sequence
  Synthetic
caggaaacagctatgaccatgattacgccagttggaactgctctcattttggagggtaatcacaac

SEQ ID NO: 769 - DNA, 66 bp, Artificial Sequence
  Synthetic
acaggaaacagctatgaccatgattacgccgttggaactgctctcattttggagggtaatcacaac

SEQ ID NO: 770 - DNA, 66 bp, Artificial Sequence
  Synthetic
cacaggaaacagctatgaccatgattacgcgttggaactgctctcattttggagggtaatcacaac

SEQ ID NO: 771 - DNA, 66 bp, Artificial Sequence
  Synthetic
taaacacaggaaacagctatgaccatgattgttggaactgctctcattttggagggtaatcacaac

SEQ ID NO: 772 - DNA, 66 bp, Artificial Sequence
  Synthetic
gataaacacaggaaacagctatgaccatgagttggaactgctctcattttggagggtaatcacaac

SEQ ID NO: 773 - DNA, 66 bp, Artificial Sequence
  Synthetic
ggataaacacaggaaacagctatgaccatggttggaactgctctcattttggagggtaatcacaac

SEQ ID NO: 774 - DNA, 66 bp, Artificial Sequence
  Synthetic
cggataaacacaggaaacagctatgaccatgttggaactgctctcattttggagggtaatcacaac

SEQ ID NO: 775 - DNA, 66 bp, Artificial Sequence
  Synthetic
gcggataaacacaggaaacagctatgaccagttggaactgctctcattttggagggtaatcacaac

SEQ ID NO: 776 - DNA, 66 bp, Artificial Sequence
  Synthetic
agcggataaacacaggaaacagctatgaccgttggaactgctctcattttggagggtaatcacaac

SEQ ID NO: 777 - DNA, 66 bp, Artificial Sequence
  Synthetic
gagcggataaacacaggaaacagctatgacgttggaactgctctcattttggagggtaatcacaac

SEQ ID NO: 778 - DNA, 66 bp, Artificial Sequence
  Synthetic
tgagcggataaacacaggaaacagctatgagttggaactgctctcattttggagggtaatcacaac

SEQ ID NO: 779 - DNA, 66 bp, Artificial Sequence
  Synthetic
tgtgagcggataaacacaggaaacagctatgttggaactgctctcattttggagggtaatcacaac

SEQ ID NO: 780 - DNA, 66 bp, Artificial Sequence
  Synthetic
attgtgagcggataaacacaggaaacagctgttggaactgctctcattttggagggtaatcacaac

SEQ ID NO: 781 - DNA, 66 bp, Artificial Sequence
  Synthetic
aattgtgagcggataaacacaggaaacagcgttggaactgctctcattttggagggtaatcacaac

SEQ ID NO: 782 - DNA, 66 bp, Artificial Sequence
  Synthetic
gaattgtgagcggataaacacaggaaacaggttggaactgctctcattttggagggtaatcacaac

SEQ ID NO: 783 - DNA, 66 bp, Artificial Sequence
  Synthetic
gtggaattgtgagcggataaacacaggaaagttggaactgctctcattttggagggtaatcacaac

SEQ ID NO: 784 - DNA, 66 bp, Artificial Sequence
  Synthetic
tgtggaattgtgagcggataaacacaggaagttggaactgctctcattttggagggtaatcacaac

SEQ ID NO: 785 - DNA, 66 bp, Artificial Sequence
  Synthetic
gtgtggaattgtgagcggataaacacaggagttggaactgctctcattttggagggtaatcacaac

SEQ ID NO: 786 - DNA, 66 bp, Artificial Sequence
  Synthetic
tgtgtggaattgtgagcggataaacacagggttggaactgctctcattttggagggtaatcacaac

SEQ ID NO: 787 - DNA, 66 bp, Artificial Sequence
  Synthetic
gttgtgtggaattgtgagcggataaacacagttggaactgctctcattttggagggtaatcacaac

SEQ ID NO: 788 - DNA, 66 bp, Artificial Sequence
  Synthetic
tgttgtgtggaattgtgagcggataaacacgttggaactgctctcattttggagggtaatcacaac

SEQ ID NO: 789 - DNA, 66 bp, Artificial Sequence
  Synthetic
atgttgtgtggaattgtgagcggataaacagttggaactgctctcattttggagggtaatcacaac

SEQ ID NO: 790 - DNA, 66 bp, Artificial Sequence
  Synthetic
gtatgttgtgtggaattgtgagcggataaagttggaactgctctcattttggagggtaatcacaac

SEQ ID NO: 791 - DNA, 66 bp, Artificial Sequence
  Synthetic
cgtatgttgtgtggaattgtgagcggataagttggaactgctctcattttggagggtaatcacaac

SEQ ID NO: 792 - DNA, 66 bp, Artificial Sequence
  Synthetic
tcgtatgttgtgtggaattgtgagcggatagttggaactgctctcattttggagggtaatcacaac

SEQ ID NO: 793 - DNA, 66 bp, Artificial Sequence
  Synthetic
gctcgtatgttgtgtggaattgtgagcggagttggaactgctctcattttggagggtaatcacaac

SEQ ID NO: 794 - DNA, 66 bp, Artificial Sequence
  Synthetic
ggctcgtatgttgtgtggaattgtgagcgggttggaactgctctcattttggagggtaatcacaac

SEQ ID NO: 795 - DNA, 66 bp, Artificial Sequence
  Synthetic
ccggctcgtatgttgtgtggaattgtgagcgttggaactgctctcattttggagggtaatcacaac

SEQ ID NO: 796 - DNA, 66 bp, Artificial Sequence
  Synthetic
tccggctcgtatgttgtgtggaattgtgaggttggaactgctctcattttggagggtaatcacaac

SEQ ID NO: 797 - DNA, 66 bp, Artificial Sequence
  Synthetic
ttccggctcgtatgttgtgtggaattgtgagttggaactgctctcattttggagggtaatcacaac

SEQ ID NO: 798 - DNA, 66 bp, Artificial Sequence
  Synthetic
gcttccggctcgtatgttgtgtggaattgtgttggaactgctctcattttggagggtaatcacaac

SEQ ID NO: 799 - DNA, 66 bp, Artificial Sequence
  Synthetic
tgcttccggctcgtatgttgtgtggaattggttggaactgctctcattttggagggtaatcacaac

SEQ ID NO: 800 - DNA, 66 bp, Artificial Sequence
  Synthetic
atgcttccggctcgtatgttgtgtggaattgttggaactgctctcattttggagggtaatcacaac

SEQ ID NO: 801 - DNA, 66 bp, Artificial Sequence
  Synthetic
ttatgcttccggctcgtatgttgtgtggaagttggaactgctctcattttggagggtaatcacaac

SEQ ID NO: 802 - DNA, 66 bp, Artificial Sequence
  Synthetic
tttatgcttccggctcgtatgttgtgtggagttggaactgctctcattttggagggtaatcacaac

SEQ ID NO: 803 - DNA, 66 bp, Artificial Sequence
  Synthetic
aactgtgaaagacaactcttcactgcgaatgttggaactgctctcattttggagggtaatcacaac

SEQ ID NO: 804 - DNA, 66 bp, Artificial Sequence
  Synthetic
caactgtgaaagacaactcttcactgcgaagttggaactgctctcattttggagggtaatcacaac

SEQ ID NO: 805 - DNA, 66 bp, Artificial Sequence
  Synthetic
acaactgtgaaagacaactcttcactgcgagttggaactgctctcattttggagggtaatcacaac

SEQ ID NO: 806 - DNA, 66 bp, Artificial Sequence
  Synthetic
atacaactgtgaaagacaactcttcactgcgttggaactgctctcattttggagggtaatcacaac

SEQ ID NO: 807 - DNA, 66 bp, Artificial Sequence
  Synthetic
gatacaactgtgaaagacaactcttcactggttggaactgctctcattttggagggtaatcacaac

SEQ ID NO: 808 - DNA, 66 bp, Artificial Sequence
  Synthetic
ttgatacaactgtgaaagacaactcttcacgttggaactgctctcattttggagggtaatcacaac

SEQ ID NO: 809 - DNA, 66 bp, Artificial Sequence
  Synthetic
tttgatacaactgtgaaagacaactcttcagttggaactgctctcattttggagggtaatcacaac

SEQ ID NO: 810 - DNA, 66 bp, Artificial Sequence
  Synthetic
cgtttgatacaactgtgaaagacaactcttgttggaactgctctcattttggagggtaatcacaac

SEQ ID NO: 811 - DNA, 66 bp, Artificial Sequence
  Synthetic
ccgtttgatacaactgtgaaagacaactctgttggaactgctctcattttggagggtaatcacaac

SEQ ID NO: 812 - DNA, 66 bp, Artificial Sequence
  Synthetic
ctccgtttgatacaactgtgaaagacaactgttggaactgctctcattttggagggtaatcacaac

SEQ ID NO: 813 - DNA, 66 bp, Artificial Sequence
  Synthetic
gctccgtttgatacaactgtgaaagacaacgttggaactgctctcattttggagggtaatcacaac

SEQ ID NO: 814 - DNA, 66 bp, Artificial Sequence
  Synthetic
tggctccgtttgatacaactgtgaaagacagttggaactgctctcattttggagggtaatcacaac

SEQ ID NO: 815 - DNA, 66 bp, Artificial Sequence
  Synthetic
ttggctccgtttgatacaactgtgaaagacgttggaactgctctcattttggagggtaatcacaac

SEQ ID NO: 816 - DNA, 66 bp, Artificial Sequence
  Synthetic
tttggctccgtttgatacaactgtgaaagagttggaactgctctcattttggagggtaatcacaac

SEQ ID NO: 817 - DNA, 66 bp, Artificial Sequence
  Synthetic
tttttggctccgtttgatacaactgtgaaagttggaactgctctcattttggagggtaatcacaac

SEQ ID NO: 818 - DNA, 66 bp, Artificial Sequence
  Synthetic
gatgtttttggctccgtttgatacaactgtgttggaactgctctcattttggagggtaatcacaac

SEQ ID NO: 819 - DNA, 66 bp, Artificial Sequence
  Synthetic
tgatgtttttggctccgtttgatacaactggttggaactgctctcattttggagggtaatcacaac

SEQ ID NO: 820 - DNA, 66 bp, Artificial Sequence
  Synthetic
ctgatgtttttggctccgtttgatacaactgttggaactgctctcattttggagggtaatcacaac

SEQ ID NO: 821 - DNA, 66 bp, Artificial Sequence
  Synthetic
actgatgtttttggctccgtttgatacaacgttggaactgctctcattttggagggtaatcacaac

SEQ ID NO: 822 - DNA, 66 bp, Artificial Sequence
  Synthetic
gaccactgatgtttttggctccgtttgatagttggaactgctctcattttggagggtaatcacaac

SEQ ID NO: 823 - DNA, 66 bp, Artificial Sequence
  Synthetic
tgaccactgatgtttttggctccgtttgatgttggaactgctctcattttggagggtaatcacaac

SEQ ID NO: 824 - DNA, 66 bp, Artificial Sequence
  Synthetic
ctgaccactgatgtttttggctccgtttgagttggaactgctctcattttggagggtaatcacaac

SEQ ID NO: 825 - DNA, 66 bp, Artificial Sequence
  Synthetic
ctctgaccactgatgtttttggctccgtttgttggaactgctctcattttggagggtaatcacaac

SEQ ID NO: 826 - DNA, 66 bp, Artificial Sequence
  Synthetic
actctgaccactgatgtttttggctccgttgttggaactgctctcattttggagggtaatcacaac

SEQ ID NO: 827 - DNA, 66 bp, Artificial Sequence
  Synthetic
gactctgaccactgatgtttttggctccgtgttggaactgctctcattttggagggtaatcacaac

SEQ ID NO: 828 - DNA, 66 bp, Artificial Sequence
  Synthetic
cggactctgaccactgatgtttttggctccgttggaactgctctcattttggagggtaatcacaac

SEQ ID NO: 829 - DNA, 66 bp, Artificial Sequence
  Synthetic
gccggactctgaccactgatgtttttggctgttggaactgctctcattttggagggtaatcacaac

SEQ ID NO: 830 - DNA, 66 bp, Artificial Sequence
  Synthetic
cgccggactctgaccactgatgtttttggcgttggaactgctctcattttggagggtaatcacaac

SEQ ID NO: 831 - DNA, 66 bp, Artificial Sequence
  Synthetic
gcgccggactctgaccactgatgtttttgggttggaactgctctcattttggagggtaatcacaac

SEQ ID NO: 832 - DNA, 66 bp, Artificial Sequence
  Synthetic
cgcgccggactctgaccactgatgtttttggttggaactgctctcattttggagggtaatcacaac

SEQ ID NO: 833 - DNA, 66 bp, Artificial Sequence
  Synthetic
ttcgcgccggactctgaccactgatgttttgttggaactgctctcattttggagggtaatcacaac

SEQ ID NO: 834 - DNA, 66 bp, Artificial Sequence
  Synthetic
agttcgcgccggactctgaccactgatgttgttggaactgctctcattttggagggtaatcacaac

SEQ ID NO: 835 - DNA, 66 bp, Artificial Sequence
  Synthetic
aagttcgcgccggactctgaccactgatgtgttggaactgctctcattttggagggtaatcacaac

SEQ ID NO: 836 - DNA, 66 bp, Artificial Sequence
  Synthetic
gaagttcgcgccggactctgaccactgatggttggaactgctctcattttggagggtaatcacaac

SEQ ID NO: 837 - DNA, 66 bp, Artificial Sequence
  Synthetic
agaagttcgcgccggactctgaccactgatgttggaactgctctcattttggagggtaatcacaac

SEQ ID NO: 838 - DNA, 66 bp, Artificial Sequence
  Synthetic
gaagaagttcgcgccggactctgaccactggttggaactgctctcattttggagggtaatcacaac

SEQ ID NO: 839 - DNA, 66 bp, Artificial Sequence
  Synthetic
ggaagaagttcgcgccggactctgaccactgttggaactgctctcattttggagggtaatcacaac

SEQ ID NO: 840 - DNA, 66 bp, Artificial Sequence
  Synthetic
tcggaagaagttcgcgccggactctgaccagttggaactgctctcattttggagggtaatcacaac

SEQ ID NO: 841 - DNA, 66 bp, Artificial Sequence
  Synthetic
gtcggaagaagttcgcgccggactctgaccgttggaactgctctcattttggagggtaatcacaac

SEQ ID NO: 842 - DNA, 66 bp, Artificial Sequence
  Synthetic
ggtcggaagaagttcgcgccggactctgacgttggaactgctctcattttggagggtaatcacaac

SEQ ID NO: 843 - DNA, 66 bp, Artificial Sequence
  Synthetic
gggtcggaagaagttcgcgccggactctgagttggaactgctctcattttggagggtaatcacaac

SEQ ID NO: 844 - DNA, 66 bp, Artificial Sequence
  Synthetic
tgggtcggaagaagttcgcgccggactctggttggaactgctctcattttggagggtaatcacaac

SEQ ID NO: 845 - DNA, 66 bp, Artificial Sequence
  Synthetic
ccctgggtcggaagaagttcgcgccggactgttggaactgctctcattttggagggtaatcacaac

SEQ ID NO: 846 - DNA, 66 bp, Artificial Sequence
  Synthetic
tccctgggtcggaagaagttcgcgccggacgttggaactgctctcattttggagggtaatcacaac

SEQ ID NO: 847 - DNA, 66 bp, Artificial Sequence
  Synthetic
gtccctgggtcggaagaagttcgcgccggagttggaactgctctcattttggagggtaatcacaac

SEQ ID NO: 848 - DNA, 66 bp, Artificial Sequence
  Synthetic
ggtccctgggtcggaagaagttcgcgccgggttggaactgctctcattttggagggtaatcacaac

SEQ ID NO: 849 - DNA, 66 bp, Artificial Sequence
  Synthetic
tggtccctgggtcggaagaagttcgcgccggttggaactgctctcattttggagggtaatcacaac

SEQ ID NO: 850 - DNA, 66 bp, Artificial Sequence
  Synthetic
ttggtccctgggtcggaagaagttcgcgccgttggaactgctctcattttggagggtaatcacaac

SEQ ID NO: 851 - DNA, 66 bp, Artificial Sequence
  Synthetic
gtgttggtccctgggtcggaagaagttcgcgttggaactgctctcattttggagggtaatcacaac

SEQ ID NO: 852 - DNA, 66 bp, Artificial Sequence
  Synthetic
tgtgttggtccctgggtcggaagaagttcggttggaactgctctcattttggagggtaatcacaac

SEQ ID NO: 853 - DNA, 66 bp, Artificial Sequence
  Synthetic
ttgtgttggtccctgggtcggaagaagttcgttggaactgctctcattttggagggtaatcacaac

SEQ ID NO: 854 - DNA, 66 bp, Artificial Sequence
  Synthetic
tgttgtgttggtccctgggtcggaagaagtgttggaactgctctcattttggagggtaatcacaac

SEQ ID NO: 855 - DNA, 66 bp, Artificial Sequence
  Synthetic
ttgttgtgttggtccctgggtcggaagaaggttggaactgctctcattttggagggtaatcacaac

SEQ ID NO: 856 - DNA, 66 bp, Artificial Sequence
  Synthetic
gttgttgtgttggtccctgggtcggaagaagttggaactgctctcattttggagggtaatcacaac

SEQ ID NO: 857 - DNA, 66 bp, Artificial Sequence
  Synthetic
tcagttgttgtgttggtccctgggtcggaagttggaactgctctcattttggagggtaatcacaac

SEQ ID NO: 858 - DNA, 66 bp, Artificial Sequence
  Synthetic
ttcagttgttgtgttggtccctgggtcggagttggaactgctctcattttggagggtaatcacaac

SEQ ID NO: 859 - DNA, 66 bp, Artificial Sequence
  Synthetic
cttcagttgttgtgttggtccctgggtcgggttggaactgctctcattttggagggtaatcacaac

SEQ ID NO: 860 - DNA, 66 bp, Artificial Sequence
  Synthetic
tcttcagttgttgtgttggtccctgggtcggttggaactgctctcattttggagggtaatcacaac

SEQ ID NO: 861 - DNA, 66 bp, Artificial Sequence
  Synthetic
gtcttcagttgttgtgttggtccctgggtcgttggaactgctctcattttggagggtaatcacaac

SEQ ID NO: 862 - DNA, 66 bp, Artificial Sequence
  Synthetic
ggtcttcagttgttgtgttggtccctgggtgttggaactgctctcattttggagggtaatcacaac

SEQ ID NO: 863 - DNA, 66 bp, Artificial Sequence
  Synthetic
tgtggtcttcagttgttgtgttggtccctggttggaactgctctcattttggagggtaatcacaac

SEQ ID NO: 864 - DNA, 66 bp, Artificial Sequence
  Synthetic
ttgtggtcttcagttgttgtgttggtccctgttggaactgctctcattttggagggtaatcacaac

SEQ ID NO: 865 - DNA, 66 bp, Artificial Sequence
  Synthetic
tttgtggtcttcagttgttgtgttggtcccgttggaactgctctcattttggagggtaatcacaac

SEQ ID NO: 866 - DNA, 66 bp, Artificial Sequence
  Synthetic
ttttgtggtcttcagttgttgtgttggtccgttggaactgctctcattttggagggtaatcacaac

SEQ ID NO: 867 - DNA, 66 bp, Artificial Sequence
  Synthetic
gattttgtggtcttcagttgttgtgttggtgttggaactgctctcattttggagggtaatcacaac

SEQ ID NO: 868 - DNA, 66 bp, Artificial Sequence
  Synthetic
tgattttgtggtcttcagttgttgtgttgggttggaactgctctcattttggagggtaatcacaac

SEQ ID NO: 869 - DNA, 66 bp, Artificial Sequence
  Synthetic
atgattttgtggtcttcagttgttgtgttggttggaactgctctcattttggagggtaatcacaac

SEQ ID NO: 870 - DNA, 66 bp, Artificial Sequence
  Synthetic
ccatgattttgtggtcttcagttgttgtgtgttggaactgctctcattttggagggtaatcacaac

SEQ ID NO: 871 - DNA, 66 bp, Artificial Sequence
  Synthetic
agccatgattttgtggtcttcagttgttgtgttggaactgctctcattttggagggtaatcacaac

SEQ ID NO: 872 - DNA, 66 bp, Artificial Sequence
  Synthetic
aagccatgattttgtggtcttcagttgttggttggaactgctctcattttggagggtaatcacaac

SEQ ID NO: 873 - DNA, 66 bp, Artificial Sequence
  Synthetic
gaagccatgattttgtggtcttcagttgttgttggaactgctctcattttggagggtaatcacaac

SEQ ID NO: 874 - DNA, 66 bp, Artificial Sequence
  Synthetic
tgaagccatgattttgtggtcttcagttgtgttggaactgctctcattttggagggtaatcacaac

SEQ ID NO: 875 - DNA, 66 bp, Artificial Sequence
  Synthetic
ttctgaagccatgattttgtggtcttcagtgttggaactgctctcattttggagggtaatcacaac

SEQ ID NO: 876 - DNA, 66 bp, Artificial Sequence
  Synthetic
tttctgaagccatgattttgtggtcttcaggttggaactgctctcattttggagggtaatcacaac

SEQ ID NO: 877 - DNA, 66 bp, Artificial Sequence
  Synthetic
attttctgaagccatgattttgtggtcttcgttggaactgctctcattttggagggtaatcacaac

SEQ ID NO: 878 - DNA, 66 bp, Artificial Sequence
  Synthetic
aattttctgaagccatgattttgtggtcttgttggaactgctctcattttggagggtaatcacaac

SEQ ID NO: 879 - DNA, 66 bp, Artificial Sequence
  Synthetic
gaattttctgaagccatgattttgtggtctgttggaactgctctcattttggagggtaatcacaac

SEQ ID NO: 880 - DNA, 66 bp, Artificial Sequence
  Synthetic
aggaattttctgaagccatgattttgtggtgttggaactgctctcattttggagggtaatcacaac

SEQ ID NO: 881 - DNA, 66 bp, Artificial Sequence
  Synthetic
agaggaattttctgaagccatgattttgtggttggaactgctctcattttggagggtaatcacaac

SEQ ID NO: 882 - DNA, 66 bp, Artificial Sequence
  Synthetic
cagaggaattttctgaagccatgattttgtgttggaactgctctcattttggagggtaatcacaac

SEQ ID NO: 883 - DNA, 66 bp, Artificial Sequence
  Synthetic
gcagaggaattttctgaagccatgattttggttggaactgctctcattttggagggtaatcacaac

SEQ ID NO: 884 - DNA, 66 bp, Artificial Sequence
  Synthetic
tgcagaggaattttctgaagccatgattttgttggaactgctctcattttggagggtaatcacaac

SEQ ID NO: 885 - DNA, 66 bp, Artificial Sequence
  Synthetic
cattgcagaggaattttctgaagccatgatgttggaactgctctcattttggagggtaatcacaac

SEQ ID NO: 886 - DNA, 66 bp, Artificial Sequence
  Synthetic
ccattgcagaggaattttctgaagccatgagttggaactgctctcattttggagggtaatcacaac

SEQ ID NO: 887 - DNA, 66 bp, Artificial Sequence
  Synthetic
accattgcagaggaattttctgaagccatggttggaactgctctcattttggagggtaatcacaac

SEQ ID NO: 888 - DNA, 66 bp, Artificial Sequence
  Synthetic
aaccattgcagaggaattttctgaagccatgttggaactgctctcattttggagggtaatcacaac

SEQ ID NO: 889 - DNA, 66 bp, Artificial Sequence
  Synthetic
ttgaaccattgcagaggaattttctgaagcgttggaactgctctcattttggagggtaatcacaac

SEQ ID NO: 890 - DNA, 66 bp, Artificial Sequence
  Synthetic
acttgaaccattgcagaggaattttctgaagttggaactgctctcattttggagggtaatcacaac

SEQ ID NO: 891 - DNA, 66 bp, Artificial Sequence
  Synthetic
cacttgaaccattgcagaggaattttctgagttggaactgctctcattttggagggtaatcacaac

SEQ ID NO: 892 - DNA, 66 bp, Artificial Sequence
  Synthetic
tgcacttgaaccattgcagaggaattttctgttggaactgctctcattttggagggtaatcacaac

SEQ ID NO: 893 - DNA, 66 bp, Artificial Sequence
  Synthetic
gtgcacttgaaccattgcagaggaattttcgttggaactgctctcattttggagggtaatcacaac

SEQ ID NO: 894 - DNA, 66 bp, Artificial Sequence
  Synthetic
ctgtgcacttgaaccattgcagaggaatttgttggaactgctctcattttggagggtaatcacaac

SEQ ID NO: 895 - DNA, 66 bp, Artificial Sequence
  Synthetic
actgtgcacttgaaccattgcagaggaattgttggaactgctctcattttggagggtaatcacaac

SEQ ID NO: 896 - DNA, 66 bp, Artificial Sequence
  Synthetic
tgactgtgcacttgaaccattgcagaggaagttggaactgctctcattttggagggtaatcacaac

SEQ ID NO: 897 - DNA, 66 bp, Artificial Sequence
  Synthetic
ttgactgtgcacttgaaccattgcagaggagttggaactgctctcattttggagggtaatcacaac

SEQ ID NO: 898 - DNA, 64 bp, Artificial Sequence
  Synthetic
gatttagactaccccaaaaacgaaggggactaaaactatcaaccaataatagtctgaatgtcat

SEQ ID NO: 899 - DNA, 64 bp, Artificial Sequence; identical to SEQ ID NO: 253
  Synthetic

SEQ ID NO: 900 - DNA, 64 bp, Artificial Sequence
  Synthetic
gatttagactaccccaaaaacgaaggggactaaaacttaggatgctttgtttcaggtgtatcaa

SEQ ID NO: 901 - DNA, 64 bp, Artificial Sequence
  Synthetic
gatttagactaccccaaaaacgaaggggactaaaactttctctacaccttttttaggatgcttt

SEQ ID NO: 902 - DNA, 64 bp, Artificial Sequence
  Synthetic
gatttagactaccccaaaaacgaaggggactaaaactgtcattggttgacctttgtacattaat

SEQ ID NO: 903 - DNA, 64 bp, Artificial Sequence
  Synthetic
gatttagactaccccaaaaacgaaggggactaaaacatagtctgaatgtcattggttgaccttt

SEQ ID NO: 904 - DNA, 64 bp, Artificial Sequence
  Synthetic
gatttagactaccccaaaaacgaaggggactaaaacagtctgaatgtcattggttgacctttgt

SEQ ID NO: 905 - DNA, 64 bp, Artificial Sequence; identical to SEQ ID NO: 236
  Synthetic

SEQ ID NO: 906 - DNA, 64 bp, Artificial Sequence; identical to SEQ ID NO: 272
  Synthetic

SEQ ID NO: 907 - DNA, 64 bp, Artificial Sequence
  Synthetic
gatttagactaccccaaaaacgaaggggactaaaacaggatgctttgtttcaggtgtatcaacc

SEQ ID NO: 908 - DNA, 64 bp, Artificial Sequence
  Synthetic
gatttagactaccccaaaaacgaaggggactaaaaccatatttctctacaccttttttaggatg

SEQ ID NO: 909 - DNA, 64 bp, Artificial Sequence
  Synthetic
gatttagactaccccaaaaacgaaggggactaaaacaccatatttctctacaccttttttagga

SEQ ID NO: 910 - DNA, 64 bp, Artificial Sequence; identical to SEQ ID NO: 277
  Synthetic

SEQ ID NO: 911 - DNA, 64 bp, Artificial Sequence
  Synthetic
gatttagactaccccaaaaacgaaggggactaaaactacaccttttttaggatgctttgtttca

SEQ ID NO: 912 - DNA, 64 bp, Artificial Sequence; identical to SEQ ID NO: 304
  Synthetic

SEQ ID NO: 913 - DNA, 64 bp, Artificial Sequence; identical to SEQ ID NO: 325
  Synthetic

SEQ ID NO: 914 - DNA, 64 bp, Artificial Sequence
  Synthetic
gatttagactaccccaaaaacgaaggggactaaaactgaatgtcattggttgacctttgtacat

SEQ ID NO: 915 - DNA, 64 bp, Artificial Sequence
  Synthetic
gatttagactaccccaaaaacgaaggggactaaaacttttttaggatgctttgtttcaggtgta

SEQ ID NO: 916 - DNA, 64 bp, Artificial Sequence; identical to SEQ ID NO: 270
  Synthetic

SEQ ID NO: 917 - DNA, 64 bp, Artificial Sequence
  Synthetic
gatttagactaccccaaaaacgaaggggactaaaacttgcttcaggaccatatttctctacacc

SEQ ID NO: 918 - DNA, 64 bp, Artificial Sequence; identical to SEQ ID NO: 267
  Synthetic

SEQ ID NO: 919 - DNA, 64 bp, Artificial Sequence
  Synthetic
gatttagactaccccaaaaacgaaggggactaaaacacttgcttcaggaccatatttctctaca

SEQ ID NO: 920 - DNA, 64 bp, Artificial Sequence; identical to SEQ ID NO: 270
  Synthetic

SEQ ID NO: 921 - DNA, 64 bp, Artificial Sequence
  Synthetic
gatttagactaccccaaaaacgaaggggactaaaactctacaccttttttaggatgctttgttt

SEQ ID NO: 922 - DNA, 64 bp, Artificial Sequence; identical to SEQ ID NO: 289
  Synthetic

SEQ ID NO: 923 - DNA, 64 bp, Artificial Sequence; identical to SEQ ID NO: 245
  Synthetic

SEQ ID NO: 924 - DNA, 64 bp, Artificial Sequence
  Synthetic
gatttagactaccccaaaaacgaaggggactaaaacattggttgacctttgtacattaatttaa

SEQ ID NO: 925 - DNA, 64 bp, Artificial Sequence; identical to SEQ ID NO: 252
  Synthetic

SEQ ID NO: 926 - DNA, 64 bp, Artificial Sequence; identical to SEQ ID NO: 282
  Synthetic

SEQ ID NO: 927 - DNA, 64 bp, Artificial Sequence; identical to SEQ ID NO: 317
  Synthetic

SEQ ID NO: 928 - DNA, 64 bp, Artificial Sequence
  Synthetic
gatttagactaccccaaaaacgaaggggactaaaacgcgccactggccacgtggttgctgttgg

SEQ ID NO: 929 - DNA, 64 bp, Artificial Sequence
  Synthetic
gatttagactaccccaaaaacgaaggggactaaaactggctgcctccccggcgccactggccac

SEQ ID NO: 930 - DNA, 64 bp, Artificial Sequence
  Synthetic
gatttagactaccccaaaaacgaaggggactaaaacctgcctccccggcgccactggccacgtg

SEQ ID NO: 931 - DNA, 64 bp, Artificial Sequence
  Synthetic
gatttagactaccccaaaaacgaaggggactaaaacggctgcctccccggcgccactggccacg

SEQ ID NO: 932 - DNA, 64 bp, Artificial Sequence
  Synthetic
gatttagactaccccaaaaacgaaggggactaaaacccccggcgccactggccacgtggttgct

SEQ ID NO: 933 - DNA, 64 bp, Artificial Sequence
  Synthetic
gatttagactaccccaaaaacgaaggggactaaaacgctgcctccccggcgccactggccacgt

SEQ ID NO: 934 - DNA, 64 bp, Artificial Sequence
  Synthetic
gatttagactaccccaaaaacgaaggggactaaaaccgccactggccacgtggttgctgttggg

SEQ ID NO: 935 - DNA, 64 bp, Artificial Sequence
  Synthetic
gatttagactaccccaaaaacgaaggggactaaaaccggcgccactggccacgtggttgctgtt

SEQ ID NO: 936 - DNA, 64 bp, Artificial Sequence
  Synthetic
gatttagactaccccaaaaacgaaggggactaaaacatggctgcctccccggcgccactggcca

SEQ ID NO: 937 - DNA, 64 bp, Artificial Sequence
  Synthetic
gatttagactaccccaaaaacgaaggggactaaaaccccggcgccactggccacgtggttgctg

SEQ ID NO: 938 - DNA, 64 bp, Artificial Sequence
  Synthetic
gatttagactaccccaaaaacgaaggggactaaaacaatggctgcctccccggcgccactggcc

SEQ ID NO: 939 - DNA, 64 bp, Artificial Sequence
  Synthetic
gatttagactaccccaaaaacgaaggggactaaaacctccccggcgccactggccacgtggttg

SEQ ID NO: 940 - DNA, 64 bp, Artificial Sequence
  Synthetic
gatttagactaccccaaaaacgaaggggactaaaaccctccccggcgccactggccacgtggtt

SEQ ID NO: 941 - DNA, 64 bp, Artificial Sequence
  Synthetic
gatttagactaccccaaaaacgaaggggactaaaactcaatggctgcctccccggcgccactgg

SEQ ID NO: 942 - DNA, 64 bp, Artificial Sequence
  Synthetic
gatttagactaccccaaaaacgaaggggactaaaacccggcgccactggccacgtggttgctgt

SEQ ID NO: 943 - DNA, 64 bp, Artificial Sequence
  Synthetic
gatttagactaccccaaaaacgaaggggactaaaaccaatggctgcctccccggcgccactggc

SEQ ID NO: 944 - DNA, 64 bp, Artificial Sequence
  Synthetic
gatttagactaccccaaaaacgaaggggactaaaactgcctccccggcgccactggccacgtgg

SEQ ID NO: 945 - DNA, 64 bp, Artificial Sequence
  Synthetic
gatttagactaccccaaaaacgaaggggactaaaactccccggcgccactggccacgtggttgc

SEQ ID NO: 946 - DNA, 64 bp, Artificial Sequence
  Synthetic
gatttagactaccccaaaaacgaaggggactaaaacggcgccactggccacgtggttgctgttg

SEQ ID NO: 947 - DNA, 64 bp, Artificial Sequence
  Synthetic
gatttagactaccccaaaaacgaaggggactaaaacgcctccccggcgccactggccacgtggt

SEQ ID NO: 948 - DNA, 64 bp, Artificial Sequence
  Synthetic
gatttagactaccccaaaaacgaaggggactaaaactctcaatggctttcccctgggtgatgca

SEQ ID NO: 949 - DNA, 64 bp, Artificial Sequence
  Synthetic
gatttagactaccccaaaaacgaaggggactaaaacatggctttcccctgggtgatgcaagagc

SEQ ID NO: 950 - DNA, 64 bp, Artificial Sequence
  Synthetic
gatttagactaccccaaaaacgaaggggactaaaacaatggctttcccctgggtgatgcaagag

SEQ ID NO: 951 - DNA, 64 bp, Artificial Sequence
  Synthetic
gatttagactaccccaaaaacgaaggggactaaaacgggtgatgcaagagctgaggtcctgcag

SEQ ID NO: 952 - DNA, 64 bp, Artificial Sequence
  Synthetic
gatttagactaccccaaaaacgaaggggactaaaactggctttcccctgggtgatgcaagagct

SEQ ID NO: 953 - DNA, 64 bp, Artificial Sequence
  Synthetic
gatttagactaccccaaaaacgaaggggactaaaacctcaatggctttcccctgggtgatgcaa

SEQ ID NO: 954 - DNA, 64 bp, Artificial Sequence
  Synthetic
gatttagactaccccaaaaacgaaggggactaaaacttcccctgggtgatgcaagagctgaggt

SEQ ID NO: 955 - DNA, 64 bp, Artificial Sequence
  Synthetic
gatttagactaccccaaaaacgaaggggactaaaacgctttcccctgggtgatgcaagagctga

SEQ ID NO: 956 - DNA, 64 bp, Artificial Sequence
  Synthetic
gatttagactaccccaaaaacgaaggggactaaaactcccctgggtgatgcaagagctgaggtc

SEQ ID NO: 957 - DNA, 64 bp, Artificial Sequence
  Synthetic
gatttagactaccccaaaaacgaaggggactaaaacctttcccctgggtgatgcaagagctgag

SEQ ID NO: 958 - DNA, 64 bp, Artificial Sequence
  Synthetic
gatttagactaccccaaaaacgaaggggactaaaaccaatggctttcccctgggtgatgcaaga

SEQ ID NO: 959 - DNA, 64 bp, Artificial Sequence
  Synthetic
gatttagactaccccaaaaacgaaggggactaaaaccctgggtgatgcaagagctgaggtcctg

SEQ ID NO: 960 - DNA, 64 bp, Artificial Sequence
  Synthetic
gatttagactaccccaaaaacgaaggggactaaaacggtctcaatggctttcccctgggtgatg

SEQ ID NO: 961 - DNA, 64 bp, Artificial Sequence
  Synthetic
gatttagactaccccaaaaacgaaggggactaaaacgggtctcaatggctttcccctgggtgat

SEQ ID NO: 962 - DNA, 64 bp, Artificial Sequence
  Synthetic
gatttagactaccccaaaaacgaaggggactaaaacggctttcccctgggtgatgcaagagctg

SEQ ID NO: 963 - DNA, 64 bp, Artificial Sequence
  Synthetic
gatttagactaccccaaaaacgaaggggactaaaactttcccctgggtgatgcaagagctgagg

SEQ ID NO: 964 - DNA, 64 bp, Artificial Sequence
  Synthetic
gatttagactaccccaaaaacgaaggggactaaaaccccctgggtgatgcaagagctgaggtcc

SEQ ID NO: 965 - DNA, 64 bp, Artificial Sequence
  Synthetic
gatttagactaccccaaaaacgaaggggactaaaactgggtgatgcaagagctgaggtcctgca

SEQ ID NO: 966 - DNA, 64 bp, Artificial Sequence
  Synthetic
gatttagactaccccaaaaacgaaggggactaaaacgtctcaatggctttcccctgggtgatgc

SEQ ID NO: 967 - DNA, 64 bp, Artificial Sequence
  Synthetic
gatttagactaccccaaaaacgaaggggactaaaacctgggtgatgcaagagctgaggtcctgc

SEQ ID NO: 968 - DNA, 64 bp, Artificial Sequence
  Synthetic
gatttagactaccccaaaaacgaaggggactaaaacccctgggtgatgcaagagctgaggtcct

SEQ ID NO: 969 - DNA, 64 bp, Artificial Sequence
  Synthetic
gatttagactaccccaaaaacgaaggggactaaaactcaatggctttcccctgggtgatgcaag

SEQ ID NO: 970 - DNA, 64 bp, Artificial Sequence
  Synthetic
gatttagactaccccaaaaacgaaggggactaaaactgggtctcaatggctttcccctgggtga

SEQ ID NO: 971 - DNA, 66 bp, Artificial Sequence
  Synthetic
cggcgccactggccacgtggttgctgttgggttggaactgctctcattttggagggtaatcacaac

SEQ ID NO: 972 - DNA, 66 bp, Artificial Sequence
  Synthetic
ccggcgccactggccacgtggttgctgttggttggaactgctctcattttggagggtaatcacaac

SEQ ID NO: 973 - DNA, 66 bp, Artificial Sequence
  Synthetic
cccggcgccactggccacgtggttgctgttgttggaactgctctcattttggagggtaatcacaac

SEQ ID NO: 974 - DNA, 66 bp, Artificial Sequence
  Synthetic
ccccggcgccactggccacgtggttgctgtgttggaactgctctcattttggagggtaatcacaac

SEQ ID NO: 975 - DNA, 66 bp, Artificial Sequence
  Synthetic
tccccggcgccactggccacgtggttgctggttggaactgctctcattttggagggtaatcacaac

SEQ ID NO: 976 - DNA, 66 bp, Artificial Sequence
  Synthetic
ctccccggcgccactggccacgtggttgctgttggaactgctctcattttggagggtaatcacaac

SEQ ID NO: 977 - DNA, 66 bp, Artificial Sequence
  Synthetic
cctccccggcgccactggccacgtggttgcgttggaactgctctcattttggagggtaatcacaac

SEQ ID NO: 978 - DNA, 66 bp, Artificial Sequence
  Synthetic
gcctccccggcgccactggccacgtggttggttggaactgctctcattttggagggtaatcacaac

SEQ ID NO: 979 - DNA, 66 bp, Artificial Sequence
  Synthetic
tgcctccccggcgccactggccacgtggttgttggaactgctctcattttggagggtaatcacaac

SEQ ID NO: 980 - DNA, 66 bp, Artificial Sequence
  Synthetic
ctgcctccccggcgccactggccacgtggtgttggaactgctctcattttggagggtaatcacaac

SEQ ID NO: 981 - DNA, 66 bp, Artificial Sequence
  Synthetic
gctgcctccccggcgccactggccacgtgggttggaactgctctcattttggagggtaatcacaac

SEQ ID NO: 982 - DNA, 66 bp, Artificial Sequence
  Synthetic
ggctgcctccccggcgccactggccacgtggttggaactgctctcattttggagggtaatcacaac

SEQ ID NO: 983 - DNA, 66 bp, Artificial Sequence
  Synthetic
tggctgcctccccggcgccactggccacgtgttggaactgctctcattttggagggtaatcacaac

SEQ ID NO: 984 - DNA, 66 bp, Artificial Sequence
  Synthetic
atggctgcctccccggcgccactggccacggttggaactgctctcattttggagggtaatcacaac

SEQ ID NO: 985 - DNA, 66 bp, Artificial Sequence
  Synthetic
aatggctgcctccccggcgccactggccacgttggaactgctctcattttggagggtaatcacaac

SEQ ID NO: 986 - DNA, 66 bp, Artificial Sequence
  Synthetic
caatggctgcctccccggcgccactggccagttggaactgctctcattttggagggtaatcacaac

SEQ ID NO: 987 - DNA, 66 bp, Artificial Sequence
  Synthetic
ctgggtgatgcaagagctgaggtcctgcaggttggaactgctctcattttggagggtaatcacaac

SEQ ID NO: 988 - DNA, 66 bp, Artificial Sequence
  Synthetic
cctgggtgatgcaagagctgaggtcctgcagttggaactgctctcattttggagggtaatcacaac

SEQ ID NO: 989 - DNA, 66 bp, Artificial Sequence
  Synthetic
ccctgggtgatgcaagagctgaggtcctgcgttggaactgctctcattttggagggtaatcacaac

SEQ ID NO: 990 - DNA, 66 bp, Artificial Sequence
  Synthetic
cccctgggtgatgcaagagctgaggtcctggttggaactgctctcattttggagggtaatcacaac

SEQ ID NO: 991 - DNA, 66 bp, Artificial Sequence
  Synthetic
tcccctgggtgatgcaagagctgaggtcctgttggaactgctctcattttggagggtaatcacaac

SEQ ID NO: 992 - DNA, 66 bp, Artificial Sequence
  Synthetic
ttcccctgggtgatgcaagagctgaggtccgttggaactgctctcattttggagggtaatcacaac

SEQ ID NO: 993 - DNA, 66 bp, Artificial Sequence
  Synthetic
tttcccctgggtgatgcaagagctgaggtcgttggaactgctctcattttggagggtaatcacaac

SEQ ID NO: 994 - DNA, 66 bp, Artificial Sequence
  Synthetic
ctttcccctgggtgatgcaagagctgaggtgttggaactgctctcattttggagggtaatcacaac

SEQ ID NO: 995 - DNA, 66 bp, Artificial Sequence
  Synthetic
gctttcccctgggtgatgcaagagctgagggttggaactgctctcattttggagggtaatcacaac

SEQ ID NO: 996 - DNA, 66 bp, Artificial Sequence
  Synthetic
ggctttcccctgggtgatgcaagagctgaggttggaactgctctcattttggagggtaatcacaac

SEQ ID NO: 997 - DNA, 66 bp, Artificial Sequence
  Synthetic
tggctttcccctgggtgatgcaagagctgagttggaactgctctcattttggagggtaatcacaac

SEQ ID NO: 998 - DNA, 66 bp, Artificial Sequence
  Synthetic
atggctttcccctgggtgatgcaagagctggttggaactgctctcattttggagggtaatcacaac

SEQ ID NO: 999 - DNA, 66 bp, Artificial Sequence
  Synthetic
aatggctttcccctgggtgatgcaagagctgttggaactgctctcattttggagggtaatcacaac

SEQ ID NO: 1000 - DNA, 66 bp, Artificial Sequence
  Synthetic
caatggctttcccctgggtgatgcaagagcgttggaactgctctcattttggagggtaatcacaac

SEQ ID NO: 1001 - DNA, 66 bp, Artificial Sequence
  Synthetic
tcaatggctttcccctgggtgatgcaagaggttggaactgctctcattttggagggtaatcacaac

SEQ ID NO: 1002 - DNA, 66 bp, Artificial Sequence
  Synthetic
ctcaatggctttcccctgggtgatgcaagagttggaactgctctcattttggagggtaatcacaac

SEQ ID NO: 1003 - DNA, 66 bp, Artificial Sequence
  Synthetic
tctcaatggctttcccctgggtgatgcaaggttggaactgctctcattttggagggtaatcacaac

SEQ ID NO: 1004 - DNA, 66 bp, Artificial Sequence
  Synthetic
gtctcaatggctttcccctgggtgatgcaagttggaactgctctcattttggagggtaatcacaac

SEQ ID NO: 1005 - DNA, 66 bp, Artificial Sequence
  Synthetic
ggtctcaatggctttcccctgggtgatgcagttggaactgctctcattttggagggtaatcacaac

SEQ ID NO: 1006 - DNA, 66 bp, Artificial Sequence
  Synthetic
gggtctcaatggctttcccctgggtgatgcgttggaactgctctcattttggagggtaatcacaac

SEQ ID NO: 1007 - DNA, 66 bp, Artificial Sequence
  Synthetic
tgggtctcaatggctttcccctgggtgatggttggaactgctctcattttggagggtaatcacaac

SEQ ID NO: 1008 - DNA, 66 bp, Artificial Sequence
  Synthetic
ctgggtctcaatggctttcccctgggtgatgttggaactgctctcattttggagggtaatcacaac

SEQ ID NO: 1009 - DNA, 66 bp, Artificial Sequence
  Synthetic
tcattggttgacctttgtacattaatttaagttggaactgctctcattttggagggtaatcacaac

SEQ ID NO: 1010 - DNA, 66 bp, Artificial Sequence
  Synthetic
tgtcattggttgacctttgtacattaatttgttggaactgctctcattttggagggtaatcacaac

SEQ ID NO: 1011 - DNA, 66 bp, Artificial Sequence
  Synthetic
aatgtcattggttgacctttgtacattaatgttggaactgctctcattttggagggtaatcacaac

SEQ ID NO: 1012 - DNA, 66 bp, Artificial Sequence
  Synthetic
tgaatgtcattggttgacctttgtacattagttggaactgctctcattttggagggtaatcacaac

SEQ ID NO: 1013 - DNA, 66 bp, Artificial Sequence
  Synthetic
tctgaatgtcattggttgacctttgtacatgttggaactgctctcattttggagggtaatcacaac

SEQ ID NO: 1014 - DNA, 66 bp, Artificial Sequence
  Synthetic
agtctgaatgtcattggttgacctttgtacgttggaactgctctcattttggagggtaatcacaac

SEQ ID NO: 1015 - DNA, 66 bp, Artificial Sequence
  Synthetic
atagtctgaatgtcattggttgacctttgtgttggaactgctctcattttggagggtaatcacaac

SEQ ID NO: 1016 - DNA, 66 bp, Artificial Sequence
  Synthetic
taatagtctgaatgtcattggttgacctttgttggaactgctctcattttggagggtaatcacaac

SEQ ID NO: 1017 - DNA, 66 bp, Artificial Sequence
  Synthetic
aataatagtctgaatgtcattggttgacctgttggaactgctctcattttggagggtaatcacaac

SEQ ID NO: 1018 - DNA, 66 bp, Artificial Sequence
  Synthetic
ccaataatagtctgaatgtcattggttgacgttggaactgctctcattttggagggtaatcacaac

SEQ ID NO: 1019 - DNA, 66 bp, Artificial Sequence
  Synthetic
aaccaataatagtctgaatgtcattggttggttggaactgctctcattttggagggtaatcacaac

SEQ ID NO: 1020 - DNA, 66 bp, Artificial Sequence
  Synthetic
tcaaccaataatagtctgaatgtcattggtgttggaactgctctcattttggagggtaatcacaac

SEQ ID NO: 1021 - DNA, 66 bp, Artificial Sequence
  Synthetic
tatcaaccaataatagtctgaatgtcattggttggaactgctctcattttggagggtaatcacaac

SEQ ID NO: 1022 - DNA, 66 bp, Artificial Sequence
  Synthetic
tgtatcaaccaataatagtctgaatgtcatgttggaactgctctcattttggagggtaatcacaac

SEQ ID NO: 1023 - DNA, 66 bp, Artificial Sequence
  Synthetic
ggtgtatcaaccaataatagtctgaatgtcgttggaactgctctcattttggagggtaatcacaac

SEQ ID NO: 1024 - DNA, 66 bp, Artificial Sequence
  Synthetic
caggtgtatcaaccaataatagtctgaatggttggaactgctctcattttggagggtaatcacaac

SEQ ID NO: 1025 - DNA, 66 bp, Artificial Sequence
  Synthetic
ttcaggtgtatcaaccaataatagtctgaagttggaactgctctcattttggagggtaatcacaac

SEQ ID NO: 1026 - DNA, 66 bp, Artificial Sequence
  Synthetic
gtttcaggtgtatcaaccaataatagtctggttggaactgctctcattttggagggtaatcacaac

SEQ ID NO: 1027 - DNA, 66 bp, Artificial Sequence
  Synthetic
ttgtttcaggtgtatcaaccaataatagtcgttggaactgctctcattttggagggtaatcacaac

SEQ ID NO: 1028 - DNA, 66 bp, Artificial Sequence
  Synthetic
ctttgtttcaggtgtatcaaccaataataggttggaactgctctcattttggagggtaatcacaac

SEQ ID NO: 1029 - DNA, 66 bp, Artificial Sequence
  Synthetic
tgctttgtttcaggtgtatcaaccaataatgttggaactgctctcattttggagggtaatcacaac

SEQ ID NO: 1030 - DNA, 66 bp, Artificial Sequence
  Synthetic
gatgctttgtttcaggtgtatcaaccaatagttggaactgctctcattttggagggtaatcacaac

SEQ ID NO: 1031 - DNA, 66 bp, Artificial Sequence
  Synthetic
aggatgctttgtttcaggtgtatcaaccaagttggaactgctctcattttggagggtaatcacaac

SEQ ID NO: 1032 - DNA, 66 bp, Artificial Sequence
  Synthetic
ttaggatgctttgtttcaggtgtatcaaccgttggaactgctctcattttggagggtaatcacaac

SEQ ID NO: 1033 - DNA, 66 bp, Artificial Sequence
  Synthetic
ttttaggatgctttgtttcaggtgtatcaagttggaactgctctcattttggagggtaatcacaac

SEQ ID NO: 1034 - DNA, 66 bp, Artificial Sequence
  Synthetic
ttttttaggatgctttgtttcaggtgtatcgttggaactgctctcattttggagggtaatcacaac

SEQ ID NO: 1035 - DNA, 66 bp, Artificial Sequence
  Synthetic
ccttttttaggatgctttgtttcaggtgtagttggaactgctctcattttggagggtaatcacaac

SEQ ID NO: 1036 - DNA, 66 bp, Artificial Sequence
  Synthetic
caccttttttaggatgctttgtttcaggtggttggaactgctctcattttggagggtaatcacaac

SEQ ID NO: 1037 - DNA, 66 bp, Artificial Sequence
  Synthetic
tacaccttttttaggatgctttgtttcagggttggaactgctctcattttggagggtaatcacaac

SEQ ID NO: 1038 - DNA, 66 bp, Artificial Sequence
  Synthetic
tctacaccttttttaggatgctttgtttcagttggaactgctctcattttggagggtaatcacaac

SEQ ID NO: 1039 - DNA, 66 bp, Artificial Sequence
  Synthetic
tctctacaccttttttaggatgctttgtttgttggaactgctctcattttggagggtaatcacaac

SEQ ID NO: 1040 - DNA, 66 bp, Artificial Sequence
  Synthetic
tttctctacaccttttttaggatgctttgtgttggaactgctctcattttggagggtaatcacaac

SEQ ID NO: 1041 - DNA, 66 bp, Artificial Sequence
  Synthetic
tatttctctacaccttttttaggatgctttgttggaactgctctcattttggagggtaatcacaac

SEQ ID NO: 1042 - DNA, 66 bp, Artificial Sequence
  Synthetic
catatttctctacaccttttttaggatgctgttggaactgctctcattttggagggtaatcacaac

SEQ ID NO: 1043 - DNA, 66 bp, Artificial Sequence
  Synthetic
accatatttctctacaccttttttaggatggttggaactgctctcattttggagggtaatcacaac

SEQ ID NO: 1044 - DNA, 66 bp, Artificial Sequence
  Synthetic
ggaccatatttctctacaccttttttaggagttggaactgctctcattttggagggtaatcacaac

SEQ ID NO: 1045 - DNA, 66 bp, Artificial Sequence
  Synthetic
caggaccatatttctctacaccttttttaggttggaactgctctcattttggagggtaatcacaac

SEQ ID NO: 1046 - DNA, 66 bp, Artificial Sequence
  Synthetic
ttcaggaccatatttctctacaccttttttgttggaactgctctcattttggagggtaatcacaac

SEQ ID NO: 1047 - DNA, 66 bp, Artificial Sequence
  Synthetic
gcttcaggaccatatttctctacaccttttgttggaactgctctcattttggagggtaatcacaac

SEQ ID NO: 1048 - DNA, 66 bp, Artificial Sequence
  Synthetic
ttgcttcaggaccatatttctctacaccttgttggaactgctctcattttggagggtaatcacaac

SEQ ID NO: 1049 - DNA, 66 bp, Artificial Sequence
  Synthetic
acttgcttcaggaccatatttctctacaccgttggaactgctctcattttggagggtaatcacaac

SEQ ID NO: 1050 - DNA, 66 bp, Artificial Sequence
  Synthetic
gcacttgcttcaggaccatatttctctacagttggaactgctctcattttggagggtaatcacaac

SEQ ID NO: 1051 - DNA, 66 bp, Artificial Sequence
  Synthetic
atgcacttgcttcaggaccatatttctctagttggaactgctctcattttggagggtaatcacaac

SEQ ID NO: 1052 - DNA, 66 bp, Artificial Sequence
  Synthetic
aaatgcacttgcttcaggaccatatttctcgttggaactgctctcattttggagggtaatcacaac

SEQ ID NO: 1053 - DNA, 66 bp, Artificial Sequence
  Synthetic
gtaaatgcacttgcttcaggaccatatttcgttggaactgctctcattttggagggtaatcacaac

SEQ ID NO: 1054 - DNA, 66 bp, Artificial Sequence
  Synthetic
tcaattttctttgcattttctaccatctttgttggaactgctctcattttggagggtaatcacaac

SEQ ID NO: 1055 - DNA, 66 bp, Artificial Sequence
  Synthetic
ttcaattttctttgcattttctaccatcttgttggaactgctctcattttggagggtaatcacaac

SEQ ID NO: 1056 - DNA, 66 bp, Artificial Sequence
  Synthetic
cttcaattttctttgcattttctaccatctgttggaactgctctcattttggagggtaatcacaac

SEQ ID NO: 1057 - DNA, 64 bp, Artificial Sequence; identical to SEQ ID NO: 898
  Synthetic

SEQ ID NO: 1058 - DNA, 64 bp, Artificial Sequence; identical to SEQ ID NO: 917
  Synthetic

SEQ ID NO: 1059 - DNA, 64 bp, Artificial Sequence; identical to SEQ ID NO: 928
  Synthetic

SEQ ID NO: 1060 - DNA, 64 bp, Artificial Sequence; identical to SEQ ID NO: 945
  Synthetic

SEQ ID NO: 1061 - DNA, 64 bp, Artificial Sequence; identical to SEQ ID NO: 948
  Synthetic

SEQ ID NO: 1062 - DNA, 64 bp, Artificial Sequence; identical to SEQ ID NO: 970
  Synthetic

SEQ ID NO: 1063 - DNA, 66 bp, Artificial Sequence; identical to SEQ ID NO: 1024
  Synthetic

SEQ ID NO: 1064 - DNA, 66 bp, Artificial Sequence; identical to SEQ ID NO: 1056
  Synthetic

SEQ ID NO: 1065 - DNA, 66 bp, Artificial Sequence; identical to SEQ ID NO: 984
  Synthetic

SEQ ID NO: 1066 - DNA, 66 bp, Artificial Sequence; identical to SEQ ID NO: 983
  Synthetic

SEQ ID NO: 1067 - DNA, 66 bp, Artificial Sequence; identical to SEQ ID NO: 990
  Synthetic

SEQ ID NO: 1068 - DNA, 66 bp, Artificial Sequence; identical to SEQ ID NO: 1002
  Synthetic

SEQ ID NO: 1069 - DNA, 64 bp, Artificial Sequence; identical to SEQ ID NO: 898
  Synthetic

SEQ ID NO: 1070 - DNA, 64 bp, Artificial Sequence; identical to SEQ ID NO: 917
  Synthetic

SEQ ID NO: 1071 - DNA, 64 bp, Artificial Sequence; identical to SEQ ID NO: 928
  Synthetic

SEQ ID NO: 1072 - DNA, 64 bp, Artificial Sequence; identical to SEQ ID NO: 945
  Synthetic

SEQ ID NO: 1073 - DNA, 64 bp, Artificial Sequence; identical to SEQ ID NO: 948
  Synthetic

SEQ ID NO: 1074 - DNA, 64 bp, Artificial Sequence; identical to SEQ ID NO: 970
  Synthetic

SEQ ID NO: 1075 - DNA, 66 bp, Artificial Sequence; identical to SEQ ID NO: 1024
  Synthetic

SEQ ID NO: 1076 - DNA, 66 bp, Artificial Sequence; identical to SEQ ID NO: 1056
  Synthetic

SEQ ID NO: 1077 - DNA, 66 bp, Artificial Sequence; identical to SEQ ID NO: 984
  Synthetic

SEQ ID NO: 1078 - DNA, 66 bp, Artificial Sequence; identical to SEQ ID NO: 983
  Synthetic

SEQ ID NO: 1079 - DNA, 66 bp, Artificial Sequence; identical to SEQ ID NO: 990
  Synthetic

SEQ ID NO: 1080 - DNA, 66 bp, Artificial Sequence; identical to SEQ ID NO: 1002
  Synthetic

SEQ ID NO: 1081 - DNA, 64 bp, Artificial Sequence
  Synthetic
gatttagactaccccaaaaacgaaggggactaaaacgcacgctggaggggtcgagcacgctcac

SEQ ID NO: 1082 - DNA, 64 bp, Artificial Sequence
  Synthetic
gatttagactaccccaaaaacgaaggggactaaaaccatcgcagagcacgctggaggggtcgag

SEQ ID NO: 1083 - DNA, 64 bp, Artificial Sequence; identical to SEQ ID NO: 1081
  Synthetic

SEQ ID NO: 1084 - DNA, 64 bp, Artificial Sequence; identical to SEQ ID NO: 1082
  Synthetic

SEQ ID NO: 1085 - DNA, 66 bp, Artificial Sequence; identical to SEQ ID NO: 1024
  Synthetic

SEQ ID NO: 1086 - DNA, 66 bp, Artificial Sequence; identical to SEQ ID NO: 1056
  Synthetic

SEQ ID NO: 1087 - DNA, 66 bp, Artificial Sequence; identical to SEQ ID NO: 1024
  Synthetic

SEQ ID NO: 1088 - DNA, 66 bp, Artificial Sequence; identical to SEQ ID NO: 1056
  Synthetic

SEQ ID NO: 1089 - DNA, 64 bp, Artificial Sequence
  Synthetic
gatttagactaccccaaaaacgaaggggactaaaacaagatgtggatttttacatagtaaaaat

SEQ ID NO: 1090 - DNA, 66 bp, Artificial Sequence; identical to SEQ ID NO: 1024
  Synthetic

SEQ ID NO: 1091 - DNA, 64 bp, Artificial Sequence; identical to SEQ ID NO: 1089
  Synthetic

SEQ ID NO: 1092 - DNA, 66 bp, Artificial Sequence; identical to SEQ ID NO: 1024
  Synthetic

SEQ ID NO: 1093 - DNA, 64 bp, Artificial Sequence; identical to SEQ ID NO: 1089
  Synthetic

SEQ ID NO: 1094 - DNA, 64 bp, Artificial Sequence
  Synthetic
gatttagactaccccaaaaacgaaggggactaaaacatttctagaattgaaggaattaaaccaa

SEQ ID NO: 1095 - DNA, 64 bp, Artificial Sequence; identical to SEQ ID NO: 1089
  Synthetic

SEQ ID NO: 1096 - DNA, 64 bp, Artificial Sequence
  Synthetic
gatttagactaccccaaaaacgaaggggactaaaacggggtggagtagagggcgcgaccaagag

SEQ ID NO: 1097 - DNA, 66 bp, Artificial Sequence
  Synthetic
acgccaagcttgcatgcctgcaggtcgagtgttggaactgctctcattttggagggtaatcacaac

SEQ ID NO: 1098 - DNA, 64 bp, Artificial Sequence; identical to SEQ ID NO: 369
  Synthetic

SEQ ID NO: 1099 - DNA, 66 bp, Artificial Sequence
  Synthetic
tttgcttctgtccagtgagcatggtcttcggttggaactgctctcattttggagggtaatcacaac

SEQ ID NO: 1100 - DNA, 40 bp, Artificial Sequence
  Synthetic
taatttctactcttgtagatctgtgtttatccgctcacaa

SEQ ID NO: 1101 - DNA, 28 bp, Artificial Sequence
  Synthetic
ttgagaggttggcccctgaatatgtact

SEQ ID NO: 1102 - DNA, 28 bp, Artificial Sequence
  Synthetic
gttgagaggttggcccctgaatatgtac

SEQ ID NO: 1103 - DNA, 28 bp, Artificial Sequence
  Synthetic
tgttgagaggttggcccctgaatatgta

SEQ ID NO: 1104 - DNA, 28 bp, Artificial Sequence
  Synthetic
ttgttgagaggttggcccctgaatatgt

SEQ ID NO: 1105 - DNA, 28 bp, Artificial Sequence
  Synthetic
attgttgagaggttggcccctgaatatg

SEQ ID NO: 1106 - DNA, 28 bp, Artificial Sequence
  Synthetic
cattgttgagaggttggcccctgaatat

SEQ ID NO: 1107 - DNA, 28 bp, Artificial Sequence
  Synthetic
tcattgttgagaggttggcccctgaata

SEQ ID NO: 1108 - DNA, 28 bp, Artificial Sequence
  Synthetic
gtcattgttgagaggttggcccctgaat

SEQ ID NO: 1109 - DNA, 28 bp, Artificial Sequence
  Synthetic
cgtcattgttgagaggttggcccctgaa

SEQ ID NO: 1110 - DNA, 28 bp, Artificial Sequence
  Synthetic
tcgtcattgttgagaggttggcccctga

SEQ ID NO: 1111 - DNA, 28 bp, Artificial Sequence
  Synthetic
ttcgtcattgttgagaggttggcccctg

SEQ ID NO: 1112 - DNA, 28 bp, Artificial Sequence
  Synthetic
cttcgtcattgttgagaggttggcccct

SEQ ID NO: 1113 - DNA, 28 bp, Artificial Sequence
  Synthetic
tcttcgtcattgttgagaggttggcccc

SEQ ID NO: 1114 - DNA, 28 bp, Artificial Sequence
  Synthetic
gtcttcgtcattgttgagaggttggccc

SEQ ID NO: 1115 - DNA, 28 bp, Artificial Sequence
  Synthetic
ggtcttcgtcattgttgagaggttggcc

SEQ ID NO: 1116 - DNA, 28 bp, Artificial Sequence
  Synthetic
tggtcttcgtcattgttgagaggttggc

SEQ ID NO: 1117 - DNA, 28 bp, Artificial Sequence
  Synthetic
atggtcttcgtcattgttgagaggttgg

SEQ ID NO: 1118 - DNA, 28 bp, Artificial Sequence
  Synthetic
catggtcttcgtcattgttgagaggttg

SEQ ID NO: 1119 - DNA, 28 bp, Artificial Sequence
  Synthetic
gcatggtcttcgtcattgttgagaggtt

SEQ ID NO: 1120 - DNA, 28 bp, Artificial Sequence
  Synthetic
agcatggtcttcgtcattgttgagaggt

SEQ ID NO: 1121 - DNA, 28 bp, Artificial Sequence
  Synthetic
tgagcatggtcttcgtcattgttgagag

SEQ ID NO: 1122 - DNA, 28 bp, Artificial Sequence
  Synthetic
agtgagcatggtcttcgtcattgttgag

SEQ ID NO: 1123 - DNA, 28 bp, Artificial Sequence
  Synthetic
ccagtgagcatggtcttcgtcattgttg

SEQ ID NO: 1124 - DNA, 28 bp, Artificial Sequence
  Synthetic
gtccagtgagcatggtcttcgtcattgt

SEQ ID NO: 1125 - DNA, 28 bp, Artificial Sequence
  Synthetic
ctgtccagtgagcatggtcttcgtcatt

SEQ ID NO: 1126 - DNA, 28 bp, Artificial Sequence
  Synthetic
ttctgtccagtgagcatggtcttcgtca

SEQ ID NO: 1127 - DNA, 28 bp, Artificial Sequence
  Synthetic
gcttctgtccagtgagcatggtcttcgt

SEQ ID NO: 1128 - DNA, 28 bp, Artificial Sequence
  Synthetic
ttgcttctgtccagtgagcatggtcttc

SEQ ID NO: 1129 - DNA, 28 bp, Artificial Sequence
  Synthetic
ttttgcttctgtccagtgagcatggtct

SEQ ID NO: 1130 - DNA, 28 bp, Artificial Sequence
  Synthetic
atttttgcttctgtccagtgagcatggt

SEQ ID NO: 1131 - DNA, 28 bp, Artificial Sequence
  Synthetic
gcatttttgcttctgtccagtgagcatg

SEQ ID NO: 1132 - DNA, 28 bp, Artificial Sequence
  Synthetic
cagcatttttgcttctgtccagtgagca

SEQ ID NO: 1133 - DNA, 28 bp, Artificial Sequence
  Synthetic
agcagcatttttgcttctgtccagtgag

SEQ ID NO: 1134 - DNA, 28 bp, Artificial Sequence
  Synthetic
ccagcagcatttttgcttctgtccagtg

SEQ ID NO: 1135 - DNA, 28 bp, Artificial Sequence
  Synthetic
gtccagcagcatttttgcttctgtccag

SEQ ID NO: 1136 - DNA, 28 bp, Artificial Sequence
  Synthetic
ttgtccagcagcatttttgcttctgtcc

SEQ ID NO: 1137 - DNA, 28 bp, Artificial Sequence
  Synthetic
tgttgtccagcagcatttttgcttctgt

SEQ ID NO: 1138 - DNA, 28 bp, Artificial Sequence
  Synthetic
gatgttgtccagcagcatttttgcttct

SEQ ID NO: 1139 - DNA, 28 bp, Artificial Sequence
  Synthetic
ttgatgttgtccagcagcatttttgctt

SEQ ID NO: 1140 - DNA, 28 bp, Artificial Sequence
  Synthetic
tgttgatgttgtccagcagcatttttgc

SEQ ID NO: 1141 - DNA, 28 bp, Artificial Sequence
  Synthetic
tgtgttgatgttgtccagcagcattttt

SEQ ID NO: 1142 - DNA, 28 bp, Artificial Sequence
  Synthetic
ggtgtgttgatgttgtccagcagcattt

SEQ ID NO: 1143 - DNA, 28 bp, Artificial Sequence
  Synthetic
ctggtgtgttgatgttgtccagcagcat

SEQ ID NO: 1144 - DNA, 28 bp, Artificial Sequence
  Synthetic
ttctggtgtgttgatgttgtccagcagc

SEQ ID NO: 1145 - DNA, 28 bp, Artificial Sequence
  Synthetic
ccttctggtgtgttgatgttgtccagca

SEQ ID NO: 1146 - DNA, 28 bp, Artificial Sequence
  Synthetic
tcccttctggtgtgttgatgttgtccag

SEQ ID NO: 1147 - DNA, 28 bp, Artificial Sequence
  Synthetic
aatcccttctggtgtgttgatgttgtcc

SEQ ID NO: 1148 - DNA, 28 bp, Artificial Sequence
  Synthetic
ataatcccttctggtgtgttgatgttgt

SEQ ID NO: 1149 - DNA, 28 bp, Artificial Sequence
  Synthetic
gtataatcccttctggtgtgttgatgtt

SEQ ID NO: 1150 - DNA, 28 bp, Artificial Sequence
  Synthetic
tggtataatcccttctggtgtgttgatg

SEQ ID NO: 1151 - DNA, 28 bp, Artificial Sequence
  Synthetic
gctggtataatcccttctggtgtgttga

SEQ ID NO: 1152 - DNA, 28 bp, Artificial Sequence
  Synthetic
gagctggtataatcccttctggtgtgtt

SEQ ID NO: 1153 - DNA, 28 bp, Artificial Sequence
  Synthetic
gagagctggtataatcccttctggtgtg

SEQ ID NO: 1154 - DNA, 28 bp, Artificial Sequence
  Synthetic
aagagagctggtataatcccttctggtg

SEQ ID NO: 1155 - DNA, 28 bp, Artificial Sequence
  Synthetic
caaagagagctggtataatcccttctgg

SEQ ID NO: 1156 - DNA, 28 bp, Artificial Sequence
  Synthetic
ttcaaagagagctggtataatcccttct

SEQ ID NO: 1157 - DNA, 28 bp, Artificial Sequence
  Synthetic
ggttcaaagagagctggtataatccctt

SEQ ID NO: 1158 - DNA, 28 bp, Artificial Sequence
  Synthetic
ctggttcaaagagagctggtataatccc

SEQ ID NO: 1159 - DNA, 28 bp, Artificial Sequence
  Synthetic
ttctggttcaaagagagctggtataatc

SEQ ID NO: 1160 - DNA, 28 bp, Artificial Sequence
  Synthetic
ctttctggttcaaagagagctggtataa

SEQ ID NO: 1161 - DNA, 28 bp, Artificial Sequence
  Synthetic
ccctttctggttcaaagagagctggtat

SEQ ID NO: 1162 - DNA, 28 bp, Artificial Sequence
  Synthetic
ctccctttctggttcaaagagagctggt

SEQ ID NO: 1163 - DNA, 28 bp, Artificial Sequence
  Synthetic
ttctccctttctggttcaaagagagctg

SEQ ID NO: 1164 - DNA, 28 bp, Artificial Sequence
  Synthetic
acttctccctttctggttcaaagagagc

SEQ ID NO: 1165 - DNA, 28 bp, Artificial Sequence
  Synthetic
tgacttctccctttctggttcaaagaga

SEQ ID NO: 1166 - DNA, 28 bp, Artificial Sequence
  Synthetic
ctgacttctccctttctggttcaaagag

SEQ ID NO: 1167 - DNA, 28 bp, Artificial Sequence
  Synthetic
gctgacttctccctttctggttcaaaga

SEQ ID NO: 1168 - DNA, 28 bp, Artificial Sequence
  Synthetic
ggctgacttctccctttctggttcaaag

SEQ ID NO: 1169 - DNA, 28 bp, Artificial Sequence
  Synthetic
cggctgacttctccctttctggttcaaa

SEQ ID NO: 1170 - DNA, 28 bp, Artificial Sequence
  Synthetic
gcggctgacttctccctttctggttcaa

SEQ ID NO: 1171 - DNA, 28 bp, Artificial Sequence
  Synthetic
ggcggctgacttctccctttctggttca

SEQ ID NO: 1172 - DNA, 28 bp, Artificial Sequence
  Synthetic
tggcggctgacttctccctttctggttc

SEQ ID NO: 1173 - DNA, 28 bp, Artificial Sequence
  Synthetic
atggcggctgacttctccctttctggtt

SEQ ID NO: 1174 - DNA, 28 bp, Artificial Sequence
  Synthetic
tatggcggctgacttctccctttctggt

SEQ ID NO: 1175 - DNA, 28 bp, Artificial Sequence
  Synthetic
ctatggcggctgacttctccctttctgg

SEQ ID NO: 1176 - DNA, 28 bp, Artificial Sequence
  Synthetic
tctatggcggctgacttctccctttctg

SEQ ID NO: 1177 - DNA, 28 bp, Artificial Sequence
  Synthetic
gtctatggcggctgacttctccctttct

SEQ ID NO: 1178 - DNA, 28 bp, Artificial Sequence
  Synthetic
cgtctatggcggctgacttctccctttc

SEQ ID NO: 1179 - DNA, 28 bp, Artificial Sequence
  Synthetic
ccgtctatggcggctgacttctcccttt

SEQ ID NO: 1180 - DNA, 28 bp, Artificial Sequence
  Synthetic
accgtctatggcggctgacttctccctt

SEQ ID NO: 1181 - DNA, 28 bp, Artificial Sequence
  Synthetic
caccgtctatggcggctgacttctccct

SEQ ID NO: 1182 - DNA, 28 bp, Artificial Sequence
  Synthetic
tcaccgtctatggcggctgacttctccc

SEQ ID NO: 1183 - DNA, 28 bp, Artificial Sequence
  Synthetic
ttcaccgtctatggcggctgacttctcc

SEQ ID NO: 1184 - DNA, 28 bp, Artificial Sequence
  Synthetic
attcaccgtctatggcggctgacttctc

SEQ ID NO: 1185 - DNA, 28 bp, Artificial Sequence
  Synthetic
tattcaccgtctatggcggctgacttct

SEQ ID NO: 1186 - DNA, 28 bp, Artificial Sequence
  Synthetic
gtattcaccgtctatggcggctgacttc

SEQ ID NO: 1187 - DNA, 28 bp, Artificial Sequence
  Synthetic
ggtattcaccgtctatggcggctgactt

SEQ ID NO: 1188 - DNA, 28 bp, Artificial Sequence
  Synthetic
cggtattcaccgtctatggcggctgact

SEQ ID NO: 1189 - DNA, 28 bp, Artificial Sequence
  Synthetic
gcggtattcaccgtctatggcggctgac

SEQ ID NO: 1190 - DNA, 28 bp, Artificial Sequence
  Synthetic
ggcggtattcaccgtctatggcggctga

SEQ ID NO: 1191 - DNA, 28 bp, Artificial Sequence
  Synthetic
aggcggtattcaccgtctatggcggctg

SEQ ID NO: 1192 - DNA, 28 bp, Artificial Sequence
  Synthetic
caggcggtattcaccgtctatggcggct

SEQ ID NO: 1193 - DNA, 28 bp, Artificial Sequence
  Synthetic
tcaggcggtattcaccgtctatggcggc

SEQ ID NO: 1194 - DNA, 28 bp, Artificial Sequence
  Synthetic
ttcaggcggtattcaccgtctatggcgg

SEQ ID NO: 1195 - DNA, 28 bp, Artificial Sequence
  Synthetic
cttcaggcggtattcaccgtctatggcg

SEQ ID NO: 1196 - DNA, 28 bp, Artificial Sequence
  Synthetic
ccttcaggcggtattcaccgtctatggc

SEQ ID NO: 1197 - DNA, 28 bp, Artificial Sequence
  Synthetic
ctgtgaaagacaactcttcactgcgaat

SEQ ID NO: 1198 - DNA, 28 bp, Artificial Sequence
  Synthetic
gatacaactgtgaaagacaactcttcac

SEQ ID NO: 1199 - DNA, 28 bp, Artificial Sequence
  Synthetic
tgatacaactgtgaaagacaactcttca

SEQ ID NO: 1200 - DNA, 28 bp, Artificial Sequence
  Synthetic
tttgatacaactgtgaaagacaactctt

SEQ ID NO: 1201 - DNA, 28 bp, Artificial Sequence
  Synthetic
tccgtttgatacaactgtgaaagacaac

SEQ ID NO: 1202 - DNA, 28 bp, Artificial Sequence
  Synthetic
ggctccgtttgatacaactgtgaaagac

SEQ ID NO: 1203 - DNA, 28 bp, Artificial Sequence
  Synthetic
ccactgatgtttttggctccgtttgata

SEQ ID NO: 1204 - DNA, 28 bp, Artificial Sequence
  Synthetic
accactgatgtttttggctccgtttgat

SEQ ID NO: 1205 - DNA, 28 bp, Artificial Sequence
  Synthetic
gaccactgatgtttttggctccgtttga

SEQ ID NO: 1206 - DNA, 28 bp, Artificial Sequence
  Synthetic
ctgaccactgatgtttttggctccgttt

SEQ ID NO: 1207 - DNA, 28 bp, Artificial Sequence
  Synthetic
ctctgaccactgatgtttttggctccgt

SEQ ID NO: 1208 - DNA, 28 bp, Artificial Sequence
  Synthetic
cgccggactctgaccactgatgtttttg

SEQ ID NO: 1209 - DNA, 28 bp, Artificial Sequence
  Synthetic
cgcgccggactctgaccactgatgtttt

SEQ ID NO: 1210 - DNA, 28 bp, Artificial Sequence
  Synthetic
ttcgcgccggactctgaccactgatgtt

SEQ ID NO: 1211 - DNA, 28 bp, Artificial Sequence
  Synthetic
gttcgcgccggactctgaccactgatgt

SEQ ID NO: 1212 - DNA, 28 bp, Artificial Sequence
  Synthetic
agttcgcgccggactctgaccactgatg

SEQ ID NO: 1213 - DNA, 28 bp, Artificial Sequence
  Synthetic
aagttcgcgccggactctgaccactgat

SEQ ID NO: 1214 - DNA, 28 bp, Artificial Sequence
  Synthetic
agaagttcgcgccggactctgaccactg

SEQ ID NO: 1215 - DNA, 28 bp, Artificial Sequence
  Synthetic
ggtcggaagaagttcgcgccggactctg

SEQ ID NO: 1216 - DNA, 28 bp, Artificial Sequence
  Synthetic
ctgggtcggaagaagttcgcgccggact

SEQ ID NO: 1217 - DNA, 28 bp, Artificial Sequence
  Synthetic
cctgggtcggaagaagttcgcgccggac

SEQ ID NO: 1218 - DNA, 28 bp, Artificial Sequence
  Synthetic
ccctgggtcggaagaagttcgcgccgga

SEQ ID NO: 1219 - DNA, 28 bp, Artificial Sequence
  Synthetic
tccctgggtcggaagaagttcgcgccgg

SEQ ID NO: 1220 - DNA, 28 bp, Artificial Sequence
  Synthetic
ggtccctgggtcggaagaagttcgcgcc

SEQ ID NO: 1221 - DNA, 28 bp, Artificial Sequence
  Synthetic
gttggtccctgggtcggaagaagttcgc

SEQ ID NO: 1222 - DNA, 28 bp, Artificial Sequence
  Synthetic
agttgttgtgttggtccctgggtcggaa

SEQ ID NO: 1223 - DNA, 28 bp, Artificial Sequence
  Synthetic
tcagttgttgtgttggtccctgggtcgg

SEQ ID NO: 1224 - DNA, 28 bp, Artificial Sequence
  Synthetic
ttcagttgttgtgttggtccctgggtcg

SEQ ID NO: 1225 - DNA, 28 bp, Artificial Sequence
  Synthetic
cttcagttgttgtgttggtccctgggtc

SEQ ID NO: 1226 - DNA, 28 bp, Artificial Sequence
  Synthetic
tcttcagttgttgtgttggtccctgggt

SEQ ID NO: 1227 - DNA, 28 bp, Artificial Sequence
  Synthetic
tggtcttcagttgttgtgttggtccctg

SEQ ID NO: 1228 - DNA, 28 bp, Artificial Sequence
  Synthetic
attttgtggtcttcagttgttgtgttgg

SEQ ID NO: 1229 - DNA, 28 bp, Artificial Sequence
  Synthetic
gccatgattttgtggtcttcagttgttg

SEQ ID NO: 1230 - DNA, 28 bp, Artificial Sequence
  Synthetic
aagccatgattttgtggtcttcagttgt

SEQ ID NO: 1231 - DNA, 28 bp, Artificial Sequence
  Synthetic
ctgaagccatgattttgtggtcttcagt

SEQ ID NO: 1232 - DNA, 28 bp, Artificial Sequence
  Synthetic
gaattttctgaagccatgattttgtggt

SEQ ID NO: 1233 - DNA, 28 bp, Artificial Sequence
  Synthetic
agaggaattttctgaagccatgattttg

SEQ ID NO: 1234 - DNA, 28 bp, Artificial Sequence
  Synthetic
cagaggaattttctgaagccatgatttt

SEQ ID NO: 1235 - DNA, 28 bp, Artificial Sequence
  Synthetic
cattgcagaggaattttctgaagccatg

SEQ ID NO: 1236 - DNA, 28 bp, Artificial Sequence
  Synthetic
cacttgaaccattgcagaggaattttct

SEQ ID NO: 1237 - DNA, 28 bp, Artificial Sequence
  Synthetic
ccccgggtaccgagctcgaattcactgg

SEQ ID NO: 1238 - DNA, 28 bp, Artificial Sequence
  Synthetic
tccccgggtaccgagctcgaattcactg

SEQ ID NO: 1239 - DNA, 28 bp, Artificial Sequence
  Synthetic
atccccgggtaccgagctcgaattcact

SEQ ID NO: 1240 - DNA, 28 bp, Artificial Sequence
  Synthetic
aggatccccgggtaccgagctcgaattc

SEQ ID NO: 1241 - DNA, 28 bp, Artificial Sequence
  Synthetic
agaggatccccgggtaccgagctcgaat

SEQ ID NO: 1242 - DNA, 28 bp, Artificial Sequence
  Synthetic
tctagaggatccccgggtaccgagctcg

SEQ ID NO: 1243 - DNA, 28 bp, Artificial Sequence
  Synthetic
ttctagaggatccccgggtaccgagctc

SEQ ID NO: 1244 - DNA, 28 bp, Artificial Sequence
  Synthetic
atttctagaggatccccgggtaccgagc

SEQ ID NO: 1245 - DNA, 28 bp, Artificial Sequence
  Synthetic
tatttctagaggatccccgggtaccgag

SEQ ID NO: 1246 - DNA, 28 bp, Artificial Sequence
  Synthetic
ccatatttctagaggatccccgggtacc

SEQ ID NO: 1247 - DNA, 28 bp, Artificial Sequence
  Synthetic
tccatatttctagaggatccccgggtac

SEQ ID NO: 1248 - DNA, 28 bp, Artificial Sequence
  Synthetic
atccatatttctagaggatccccgggta

SEQ ID NO: 1249 - DNA, 28 bp, Artificial Sequence
  Synthetic
taatccatatttctagaggatccccggg

SEQ ID NO: 1250 - DNA, 28 bp, Artificial Sequence
  Synthetic
gtaatccatatttctagaggatccccgg

SEQ ID NO: 1251 - DNA, 28 bp, Artificial Sequence
  Synthetic
taccaagtaatccatatttctagaggat

SEQ ID NO: 1252 - DNA, 28 bp, Artificial Sequence
  Synthetic
tctaccaagtaatccatatttctagagg

SEQ ID NO: 1253 - DNA, 28 bp, Artificial Sequence
  Synthetic
gttctaccaagtaatccatatttctaga

SEQ ID NO: 1254 - DNA, 28 bp, Artificial Sequence
  Synthetic
gctgttctaccaagtaatccatatttct

SEQ ID NO: 1255 - DNA, 28 bp, Artificial Sequence
  Synthetic
attgctgttctaccaagtaatccatatt

SEQ ID NO: 1256 - DNA, 28 bp, Artificial Sequence
  Synthetic
tagattgctgttctaccaagtaatccat

SEQ ID NO: 1257 - DNA, 28 bp, Artificial Sequence
  Synthetic
gtagattgctgttctaccaagtaatcca

SEQ ID NO: 1258 - DNA, 28 bp, Artificial Sequence
  Synthetic
agtagattgctgttctaccaagtaatcc

SEQ ID NO: 1259 - DNA, 28 bp, Artificial Sequence
  Synthetic
gagtagattgctgttctaccaagtaatc

SEQ ID NO: 1260 - DNA, 28 bp, Artificial Sequence
  Synthetic
tcgagtagattgctgttctaccaagtaa

SEQ ID NO: 1261 - DNA, 28 bp, Artificial Sequence
  Synthetic
gtcgagtagattgctgttctaccaagta

SEQ ID NO: 1262 - DNA, 28 bp, Artificial Sequence
  Synthetic
caggtcgagtagattgctgttctaccaa

SEQ ID NO: 1263 - DNA, 28 bp, Artificial Sequence
  Synthetic
gcaggtcgagtagattgctgttctacca

SEQ ID NO: 1264 - DNA, 28 bp, Artificial Sequence
  Synthetic
tgcaggtcgagtagattgctgttctacc

SEQ ID NO: 1265 - DNA, 28 bp, Artificial Sequence
  Synthetic
ctgcaggtcgagtagattgctgttctac

SEQ ID NO: 1266 - DNA, 28 bp, Artificial Sequence
  Synthetic
cctgcaggtcgagtagattgctgttcta

SEQ ID NO: 1267 - DNA, 28 bp, Artificial Sequence
  Synthetic
tgcctgcaggtcgagtagattgctgttc

SEQ ID NO: 1268 - DNA, 28 bp, Artificial Sequence
  Synthetic
atgcctgcaggtcgagtagattgctgtt

SEQ ID NO: 1269 - DNA, 28 bp, Artificial Sequence
  Synthetic
catgcctgcaggtcgagtagattgctgt

SEQ ID NO: 1270 - DNA, 28 bp, Artificial Sequence
  Synthetic
tgcatgcctgcaggtcgagtagattgct

SEQ ID NO: 1271 - DNA, 28 bp, Artificial Sequence
  Synthetic
cttgcatgcctgcaggtcgagtagattg

SEQ ID NO: 1272 - DNA, 28 bp, Artificial Sequence
  Synthetic
agcttgcatgcctgcaggtcgagtagat

SEQ ID NO: 1273 - DNA, 28 bp, Artificial Sequence
  Synthetic
caagcttgcatgcctgcaggtcgagtag

SEQ ID NO: 1274 - DNA, 28 bp, Artificial Sequence
  Synthetic
ccaagcttgcatgcctgcaggtcgagta

SEQ ID NO: 1275 - DNA, 28 bp, Artificial Sequence
  Synthetic
cgccaagcttgcatgcctgcaggtcgag

SEQ ID NO: 1276 - DNA, 28 bp, Artificial Sequence
  Synthetic
acgccaagcttgcatgcctgcaggtcga

SEQ ID NO: 1277 - DNA, 28 bp, Artificial Sequence
  Synthetic
tacgccaagcttgcatgcctgcaggtcg

SEQ ID NO: 1278 - DNA, 28 bp, Artificial Sequence
  Synthetic
ttacgccaagcttgcatgcctgcaggtc

SEQ ID NO: 1279 - DNA, 28 bp, Artificial Sequence
  Synthetic
attacgccaagcttgcatgcctgcaggt

SEQ ID NO: 1280 - DNA, 28 bp, Artificial Sequence
  Synthetic
gattacgccaagcttgcatgcctgcagg

SEQ ID NO: 1281 - DNA, 28 bp, Artificial Sequence
  Synthetic
ccatgattacgccaagcttgcatgcctg

SEQ ID NO: 1282 - DNA, 28 bp, Artificial Sequence
  Synthetic
accatgattacgccaagcttgcatgcct

SEQ ID NO: 1283 - DNA, 28 bp, Artificial Sequence
  Synthetic
gaccatgattacgccaagcttgcatgcc

SEQ ID NO: 1284 - DNA, 28 bp, Artificial Sequence
  Synthetic
atgaccatgattacgccaagcttgcatg

SEQ ID NO: 1285 - DNA, 28 bp, Artificial Sequence
  Synthetic
tatgaccatgattacgccaagcttgcat

SEQ ID NO: 1286 - DNA, 28 bp, Artificial Sequence
  Synthetic
agctatgaccatgattacgccaagcttg

SEQ ID NO: 1287 - DNA, 28 bp, Artificial Sequence
  Synthetic
cagctatgaccatgattacgccaagctt

SEQ ID NO: 1288 - DNA, 28 bp, Artificial Sequence
  Synthetic
acagctatgaccatgattacgccaagct

SEQ ID NO: 1289 - DNA, 28 bp, Artificial Sequence
  Synthetic
aacagctatgaccatgattacgccaagc

SEQ ID NO: 1290 - DNA, 28 bp, Artificial Sequence
  Synthetic
aacacaggaaacagctatgaccatgatt

SEQ ID NO: 1291 - DNA, 28 bp, Artificial Sequence
  Synthetic
taaacacaggaaacagctatgaccatga

SEQ ID NO: 1292 - DNA, 28 bp, Artificial Sequence
  Synthetic
ataaacacaggaaacagctatgaccatg

SEQ ID NO: 1293 - DNA, 28 bp, Artificial Sequence
  Synthetic
gataaacacaggaaacagctatgaccat

SEQ ID NO: 1294 - DNA, 28 bp, Artificial Sequence
  Synthetic
ggataaacacaggaaacagctatgacca

SEQ ID NO: 1295 - DNA, 28 bp, Artificial Sequence
  Synthetic
cggataaacacaggaaacagctatgacc

SEQ ID NO: 1296 - DNA, 28 bp, Artificial Sequence
  Synthetic
gcggataaacacaggaaacagctatgac

SEQ ID NO: 1297 - DNA, 28 bp, Artificial Sequence
  Synthetic
agcggataaacacaggaaacagctatga

SEQ ID NO: 1298 - DNA, 28 bp, Artificial Sequence
  Synthetic
tgagcggataaacacaggaaacagctat

SEQ ID NO: 1299 - DNA, 28 bp, Artificial Sequence
  Synthetic
tgtgagcggataaacacaggaaacagct

SEQ ID NO: 1300 - DNA, 28 bp, Artificial Sequence
  Synthetic
ttgtgagcggataaacacaggaaacagc

SEQ ID NO: 1301 - DNA, 28 bp, Artificial Sequence
  Synthetic
ggaattgtgagcggataaacacaggaaa

SEQ ID NO: 1302 - DNA, 28 bp, Artificial Sequence
  Synthetic
tggaattgtgagcggataaacacaggaa

SEQ ID NO: 1303 - DNA, 28 bp, Artificial Sequence
  Synthetic
gtggaattgtgagcggataaacacagga

SEQ ID NO: 1304 - DNA, 28 bp, Artificial Sequence
  Synthetic
tgtggaattgtgagcggataaacacagg

SEQ ID NO: 1305 - DNA, 28 bp, Artificial Sequence
  Synthetic
tgtgtggaattgtgagcggataaacaca

SEQ ID NO: 1306 - DNA, 28 bp, Artificial Sequence
  Synthetic
ttgtgtggaattgtgagcggataaacac

SEQ ID NO: 1307 - DNA, 28 bp, Artificial Sequence
  Synthetic
gttgtgtggaattgtgagcggataaaca

SEQ ID NO: 1308 - DNA, 28 bp, Artificial Sequence
  Synthetic
atgttgtgtggaattgtgagcggataaa

SEQ ID NO: 1309 - DNA, 28 bp, Artificial Sequence
  Synthetic
tatgttgtgtggaattgtgagcggataa

SEQ ID NO: 1310 - DNA, 28 bp, Artificial Sequence
  Synthetic
tcgtatgttgtgtggaattgtgagcgga

SEQ ID NO: 1311 - DNA, 28 bp, Artificial Sequence
  Synthetic
ggctcgtatgttgtgtggaattgtgagc

SEQ ID NO: 1312 - DNA, 28 bp, Artificial Sequence
  Synthetic
cggctcgtatgttgtgtggaattgtgag

SEQ ID NO: 1313 - DNA, 28 bp, Artificial Sequence
  Synthetic
ccggctcgtatgttgtgtggaattgtga

SEQ ID NO: 1314 - DNA, 28 bp, Artificial Sequence
  Synthetic
ttccggctcgtatgttgtgtggaattgt

SEQ ID NO: 1315 - DNA, 28 bp, Artificial Sequence
  Synthetic
cttccggctcgtatgttgtgtggaattg

SEQ ID NO: 1316 - DNA, 28 bp, Artificial Sequence
  Synthetic
gcttccggctcgtatgttgtgtggaatt

SEQ ID NO: 1317 - DNA, 28 bp, Artificial Sequence
  Synthetic
atgcttccggctcgtatgttgtgtggaa

SEQ ID NO: 1318 - DNA, 28 bp, Artificial Sequence
  Synthetic
tatgcttccggctcgtatgttgtgtgga

SEQ ID NO: 1319 - DNA, 28 bp, Artificial Sequence
  Synthetic
ttatgcttccggctcgtatgttgtgtgg

SEQ ID NO: 1320 - DNA, 28 bp, Artificial Sequence
  Synthetic
taatttaacagtatcaccatcaatcgct

SEQ ID NO: 1321 - DNA, 28 bp, Artificial Sequence
  Synthetic
ttaatttaacagtatcaccatcaatcgc

SEQ ID NO: 1322 - DNA, 28 bp, Artificial Sequence
  Synthetic
attaatttaacagtatcaccatcaatcg

SEQ ID NO: 1323 - DNA, 28 bp, Artificial Sequence
  Synthetic
cattaatttaacagtatcaccatcaatc

SEQ ID NO: 1324 - DNA, 28 bp, Artificial Sequence
  Synthetic
acattaatttaacagtatcaccatcaat

SEQ ID NO: 1325 - DNA, 28 bp, Artificial Sequence
  Synthetic
tacattaatttaacagtatcaccatcaa

SEQ ID NO: 1326 - DNA, 28 bp, Artificial Sequence
  Synthetic
gtacattaatttaacagtatcaccatca

SEQ ID NO: 1327 - DNA, 28 bp, Artificial Sequence
  Synthetic
tgtacattaatttaacagtatcaccatc

SEQ ID NO: 1328 - DNA, 28 bp, Artificial Sequence
  Synthetic
ttgtacattaatttaacagtatcaccat

SEQ ID NO: 1329 - DNA, 28 bp, Artificial Sequence
  Synthetic
tttgtacattaatttaacagtatcacca

SEQ ID NO: 1330 - DNA, 28 bp, Artificial Sequence
  Synthetic
ctttgtacattaatttaacagtatcacc

SEQ ID NO: 1331 - DNA, 28 bp, Artificial Sequence
  Synthetic
cctttgtacattaatttaacagtatcac

SEQ ID NO: 1332 - DNA, 28 bp, Artificial Sequence
  Synthetic
acctttgtacattaatttaacagtatca

SEQ ID NO: 1333 - DNA, 28 bp, Artificial Sequence
  Synthetic
gacctttgtacattaatttaacagtatc

SEQ ID NO: 1334 - DNA, 28 bp, Artificial Sequence
  Synthetic
tgacctttgtacattaatttaacagtat

SEQ ID NO: 1335 - DNA, 28 bp, Artificial Sequence
  Synthetic
ttgacctttgtacattaatttaacagta

SEQ ID NO: 1336 - DNA, 28 bp, Artificial Sequence
  Synthetic
gttgacctttgtacattaatttaacagt

SEQ ID NO: 1337 - DNA, 28 bp, Artificial Sequence
  Synthetic
ggttgacctttgtacattaatttaacag

SEQ ID NO: 1338 - DNA, 28 bp, Artificial Sequence
  Synthetic
tggttgacctttgtacattaatttaaca

SEQ ID NO: 1339 - DNA, 28 bp, Artificial Sequence
  Synthetic
ttggttgacctttgtacattaatttaac

SEQ ID NO: 1340 - DNA, 28 bp, Artificial Sequence
  Synthetic
cattggttgacctttgtacattaattta

SEQ ID NO: 1341 - DNA, 28 bp, Artificial Sequence
  Synthetic
gtcattggttgacctttgtacattaatt

SEQ ID NO: 1342 - DNA, 28 bp, Artificial Sequence
  Synthetic
atgtcattggttgacctttgtacattaa

SEQ ID NO: 1343 - DNA, 28 bp, Artificial Sequence
  Synthetic
gaatgtcattggttgacctttgtacatt

SEQ ID NO: 1344 - DNA, 28 bp, Artificial Sequence
  Synthetic
ctgaatgtcattggttgacctttgtaca

SEQ ID NO: 1345 - DNA, 28 bp, Artificial Sequence
  Synthetic
gtctgaatgtcattggttgacctttgta

SEQ ID NO: 1346 - DNA, 28 bp, Artificial Sequence
  Synthetic
tagtctgaatgtcattggttgacctttg

SEQ ID NO: 1347 - DNA, 28 bp, Artificial Sequence
  Synthetic
aatagtctgaatgtcattggttgacctt

SEQ ID NO: 1348 - DNA, 28 bp, Artificial Sequence
  Synthetic
ataatagtctgaatgtcattggttgacc

SEQ ID NO: 1349 - DNA, 28 bp, Artificial Sequence
  Synthetic
caataatagtctgaatgtcattggttga

SEQ ID NO: 1350 - DNA, 28 bp, Artificial Sequence
  Synthetic
accaataatagtctgaatgtcattggtt

SEQ ID NO: 1351 - DNA, 28 bp, Artificial Sequence
  Synthetic
caaccaataatagtctgaatgtcattgg

SEQ ID NO: 1352 - DNA, 28 bp, Artificial Sequence
  Synthetic
atcaaccaataatagtctgaatgtcatt

SEQ ID NO: 1353 - DNA, 28 bp, Artificial Sequence
  Synthetic
gtatcaaccaataatagtctgaatgtca

SEQ ID NO: 1354 - DNA, 28 bp, Artificial Sequence
  Synthetic
gtgtatcaaccaataatagtctgaatgt

SEQ ID NO: 1355 - DNA, 28 bp, Artificial Sequence
  Synthetic
aggtgtatcaaccaataatagtctgaat

SEQ ID NO: 1356 - DNA, 28 bp, Artificial Sequence
  Synthetic
tcaggtgtatcaaccaataatagtctga

SEQ ID NO: 1357 - DNA, 28 bp, Artificial Sequence
  Synthetic
tttcaggtgtatcaaccaataatagtct

SEQ ID NO: 1358 - DNA, 28 bp, Artificial Sequence
  Synthetic
tgtttcaggtgtatcaaccaataatagt

SEQ ID NO: 1359 - DNA, 28 bp, Artificial Sequence
  Synthetic
tttgtttcaggtgtatcaaccaataata

SEQ ID NO: 1360 - DNA, 28 bp, Artificial Sequence
  Synthetic
gctttgtttcaggtgtatcaaccaataa

SEQ ID NO: 1361 - DNA, 28 bp, Artificial Sequence
  Synthetic
atgctttgtttcaggtgtatcaaccaat

SEQ ID NO: 1362 - DNA, 28 bp, Artificial Sequence
  Synthetic
ggatgctttgtttcaggtgtatcaacca

SEQ ID NO: 1363 - DNA, 28 bp, Artificial Sequence
  Synthetic
taggatgctttgtttcaggtgtatcaac

SEQ ID NO: 1364 - DNA, 28 bp, Artificial Sequence
  Synthetic
tttaggatgctttgtttcaggtgtatca

SEQ ID NO: 1365 - DNA, 28 bp, Artificial Sequence
  Synthetic
tttttaggatgctttgtttcaggtgtat

SEQ ID NO: 1366 - DNA, 28 bp, Artificial Sequence
  Synthetic
cttttttaggatgctttgtttcaggtgt

SEQ ID NO: 1367 - DNA, 28 bp, Artificial Sequence
  Synthetic
accttttttaggatgctttgtttcaggt

SEQ ID NO: 1368 - DNA, 28 bp, Artificial Sequence
  Synthetic
acaccttttttaggatgctttgtttcag

SEQ ID NO: 1369 - DNA, 28 bp, Artificial Sequence
  Synthetic
ctacaccttttttaggatgctttgtttc

SEQ ID NO: 1370 - DNA, 28 bp, Artificial Sequence
  Synthetic
ctctacaccttttttaggatgctttgtt

SEQ ID NO: 1371 - DNA, 28 bp, Artificial Sequence
  Synthetic
ttctctacaccttttttaggatgctttg

SEQ ID NO: 1372 - DNA, 28 bp, Artificial Sequence
  Synthetic
atttctctacaccttttttaggatgctt

SEQ ID NO: 1373 - DNA, 28 bp, Artificial Sequence
  Synthetic
atatttctctacaccttttttaggatgc

SEQ ID NO: 1374 - DNA, 28 bp, Artificial Sequence
  Synthetic
ccatatttctctacaccttttttaggat

SEQ ID NO: 1375 - DNA, 28 bp, Artificial Sequence
  Synthetic
gaccatatttctctacaccttttttagg

SEQ ID NO: 1376 - DNA, 28 bp, Artificial Sequence
  Synthetic
aggaccatatttctctacacctttttta

SEQ ID NO: 1377 - DNA, 28 bp, Artificial Sequence
  Synthetic
tcaggaccatatttctctacaccttttt

SEQ ID NO: 1378 - DNA, 28 bp, Artificial Sequence
  Synthetic
cttcaggaccatatttctctacaccttt

SEQ ID NO: 1379 - DNA, 28 bp, Artificial Sequence
  Synthetic
tgcttcaggaccatatttctctacacct

SEQ ID NO: 1380 - DNA, 28 bp, Artificial Sequence
  Synthetic
cttgcttcaggaccatatttctctacac

SEQ ID NO: 1381 - DNA, 28 bp, Artificial Sequence
  Synthetic
cacttgcttcaggaccatatttctctac

SEQ ID NO: 1382 - DNA, 28 bp, Artificial Sequence
  Synthetic
tgcacttgcttcaggaccatatttctct

SEQ ID NO: 1383 - DNA, 28 bp, Artificial Sequence
  Synthetic
aatgcacttgcttcaggaccatatttct

SEQ ID NO: 1384 - DNA, 28 bp, Artificial Sequence
  Synthetic
taaatgcacttgcttcaggaccatattt

SEQ ID NO: 1385 - DNA, 28 bp, Artificial Sequence
  Synthetic
gtaaatgcacttgcttcaggaccatatt

SEQ ID NO: 1386 - DNA, 28 bp, Artificial Sequence
  Synthetic
cgtaaatgcacttgcttcaggaccatat

SEQ ID NO: 1387 - DNA, 28 bp, Artificial Sequence
  Synthetic
tcgtaaatgcacttgcttcaggaccata

SEQ ID NO: 1388 - DNA, 28 bp, Artificial Sequence
  Synthetic
ttcgtaaatgcacttgcttcaggaccat

SEQ ID NO: 1389 - DNA, 28 bp, Artificial Sequence
  Synthetic
tttcgtaaatgcacttgcttcaggacca

SEQ ID NO: 1390 - DNA, 28 bp, Artificial Sequence
  Synthetic
ttttcgtaaatgcacttgcttcaggacc

SEQ ID NO: 1391 - DNA, 28 bp, Artificial Sequence
  Synthetic
tttttcgtaaatgcacttgcttcaggac

SEQ ID NO: 1392 - DNA, 28 bp, Artificial Sequence
  Synthetic
ctttttcgtaaatgcacttgcttcagga

SEQ ID NO: 1393 - DNA, 28 bp, Artificial Sequence
  Synthetic
tctttttcgtaaatgcacttgcttcagg

SEQ ID NO: 1394 - DNA, 28 bp, Artificial Sequence
  Synthetic
atctttttcgtaaatgcacttgcttcag

SEQ ID NO: 1395 - DNA, 28 bp, Artificial Sequence
  Synthetic
catctttttcgtaaatgcacttgcttca

SEQ ID NO: 1396 - DNA, 28 bp, Artificial Sequence
  Synthetic
ccatctttttcgtaaatgcacttgcttc

SEQ ID NO: 1397 - DNA, 28 bp, Artificial Sequence
  Synthetic
accatctttttcgtaaatgcacttgctt

SEQ ID NO: 1398 - DNA, 28 bp, Artificial Sequence
  Synthetic
taccatctttttcgtaaatgcacttgct

SEQ ID NO: 1399 - DNA, 28 bp, Artificial Sequence
  Synthetic
ctaccatctttttcgtaaatgcacttgc

SEQ ID NO: 1400 - DNA, 28 bp, Artificial Sequence
  Synthetic
tctaccatctttttcgtaaatgcacttg

SEQ ID NO: 1401 - DNA, 28 bp, Artificial Sequence
  Synthetic
ttctaccatctttttcgtaaatgcactt

SEQ ID NO: 1402 - DNA, 28 bp, Artificial Sequence
  Synthetic
tttctaccatctttttcgtaaatgcact

SEQ ID NO: 1403 - DNA, 28 bp, Artificial Sequence
  Synthetic
ttttctaccatctttttcgtaaatgcac

SEQ ID NO: 1404 - DNA, 28 bp, Artificial Sequence
  Synthetic
attttctaccatctttttcgtaaatgca

SEQ ID NO: 1405 - DNA, 28 bp, Artificial Sequence
  Synthetic
cattttctaccatctttttcgtaaatgc

SEQ ID NO: 1406 - DNA, 28 bp, Artificial Sequence
  Synthetic
gcattttctaccatctttttcgtaaatg

SEQ ID NO: 1407 - DNA, 28 bp, Artificial Sequence
  Synthetic
tgcattttctaccatctttttcgtaaat

SEQ ID NO: 1408 - DNA, 28 bp, Artificial Sequence
  Synthetic
ttgcattttctaccatctttttcgtaaa

SEQ ID NO: 1409 - DNA, 28 bp, Artificial Sequence
  Synthetic
tttgcattttctaccatctttttcgtaa

SEQ ID NO: 1410 - DNA, 28 bp, Artificial Sequence
  Synthetic
ctttgcattttctaccatctttttcgta

SEQ ID NO: 1411 - DNA, 28 bp, Artificial Sequence
  Synthetic
tctttgcattttctaccatctttttcgt

SEQ ID NO: 1412 - DNA, 28 bp, Artificial Sequence
  Synthetic
ttctttgcattttctaccatctttttcg

SEQ ID NO: 1413 - DNA, 28 bp, Artificial Sequence
  Synthetic
tttctttgcattttctaccatctttttc

SEQ ID NO: 1414 - DNA, 28 bp, Artificial Sequence
  Synthetic
ttttctttgcattttctaccatcttttt

SEQ ID NO: 1415 - DNA, 28 bp, Artificial Sequence
  Synthetic
attttctttgcattttctaccatctttt

SEQ ID NO: 1416 - DNA, 28 bp, Artificial Sequence
  Synthetic
tgttgttccagtgtggagttccggtgtc

SEQ ID NO: 1417 - DNA, 28 bp, Artificial Sequence
  Synthetic
ttgttgttccagtgtggagttccggtgt

SEQ ID NO: 1418 - DNA, 28 bp, Artificial Sequence
  Synthetic
tttgttgttccagtgtggagttccggtg

SEQ ID NO: 1419 - DNA, 28 bp, Artificial Sequence
  Synthetic
ctttgttgttccagtgtggagttccggt

SEQ ID NO: 1420 - DNA, 28 bp, Artificial Sequence
  Synthetic
tctttgttgttccagtgtggagttccgg

SEQ ID NO: 1421 - DNA, 28 bp, Artificial Sequence
  Synthetic
ttctttgttgttccagtgtggagttccg

SEQ ID NO: 1422 - DNA, 28 bp, Artificial Sequence
  Synthetic
cttctttgttgttccagtgtggagttcc

SEQ ID NO: 1423 - DNA, 28 bp, Artificial Sequence
  Synthetic
gcttctttgttgttccagtgtggagttc

SEQ ID NO: 1424 - DNA, 28 bp, Artificial Sequence
  Synthetic
tgcttctttgttgttccagtgtggagtt

SEQ ID NO: 1425 - DNA, 28 bp, Artificial Sequence
  Synthetic
gtgcttctttgttgttccagtgtggagt

SEQ ID NO: 1426 - DNA, 28 bp, Artificial Sequence
  Synthetic
agtgcttctttgttgttccagtgtggag

SEQ ID NO: 1427 - DNA, 28 bp, Artificial Sequence
  Synthetic
cagtgcttctttgttgttccagtgtgga

SEQ ID NO: 1428 - DNA, 28 bp, Artificial Sequence
  Synthetic
ccagtgcttctttgttgttccagtgtgg

SEQ ID NO: 1429 - DNA, 28 bp, Artificial Sequence
  Synthetic
accagtgcttctttgttgttccagtgtg

SEQ ID NO: 1430 - DNA, 28 bp, Artificial Sequence
  Synthetic
taccagtgcttctttgttgttccagtgt

SEQ ID NO: 1431 - DNA, 28 bp, Artificial Sequence
  Synthetic
ctaccagtgcttctttgttgttccagtg

SEQ ID NO: 1432 - DNA, 28 bp, Artificial Sequence
  Synthetic
tctaccagtgcttctttgttgttccagt

SEQ ID NO: 1433 - DNA, 28 bp, Artificial Sequence
  Synthetic
ctctaccagtgcttctttgttgttccag

SEQ ID NO: 1434 - DNA, 28 bp, Artificial Sequence
  Synthetic
actctaccagtgcttctttgttgttcca

SEQ ID NO: 1435 - DNA, 28 bp, Artificial Sequence
  Synthetic
aactctaccagtgcttctttgttgttcc

SEQ ID NO: 1436 - DNA, 28 bp, Artificial Sequence
  Synthetic
tgaactctaccagtgcttctttgttgtt

SEQ ID NO: 1437 - DNA, 28 bp, Artificial Sequence
  Synthetic
cttgaactctaccagtgcttctttgttg

SEQ ID NO: 1438 - DNA, 28 bp, Artificial Sequence
  Synthetic
tccttgaactctaccagtgcttctttgt

SEQ ID NO: 1439 - DNA, 28 bp, Artificial Sequence
  Synthetic
cgtccttgaactctaccagtgcttcttt

SEQ ID NO: 1440 - DNA, 28 bp, Artificial Sequence
  Synthetic
tgcgtccttgaactctaccagtgcttct

SEQ ID NO: 1441 - DNA, 28 bp, Artificial Sequence
  Synthetic
tgtgcgtccttgaactctaccagtgctt

SEQ ID NO: 1442 - DNA, 28 bp, Artificial Sequence
  Synthetic
catgtgcgtccttgaactctaccagtgc

SEQ ID NO: 1443 - DNA, 28 bp, Artificial Sequence
  Synthetic
ggcatgtgcgtccttgaactctaccagt

SEQ ID NO: 1444 - DNA, 28 bp, Artificial Sequence
  Synthetic
ttggcatgtgcgtccttgaactctacca

SEQ ID NO: 1445 - DNA, 28 bp, Artificial Sequence
  Synthetic
ttttggcatgtgcgtccttgaactctac

SEQ ID NO: 1446 - DNA, 28 bp, Artificial Sequence
  Synthetic
ccttttggcatgtgcgtccttgaactct

SEQ ID NO: 1447 - DNA, 28 bp, Artificial Sequence
  Synthetic
tgccttttggcatgtgcgtccttgaact

SEQ ID NO: 1448 - DNA, 28 bp, Artificial Sequence
  Synthetic
tttgccttttggcatgtgcgtccttgaa

SEQ ID NO: 1449 - DNA, 28 bp, Artificial Sequence
  Synthetic
agtttgccttttggcatgtgcgtccttg

SEQ ID NO: 1450 - DNA, 28 bp, Artificial Sequence
  Synthetic
acagtttgccttttggcatgtgcgtcct

SEQ ID NO: 1451 - DNA, 28 bp, Artificial Sequence
  Synthetic
cgacagtttgccttttggcatgtgcgtc

SEQ ID NO: 1452 - DNA, 28 bp, Artificial Sequence
  Synthetic
cacgacagtttgccttttggcatgtgcg

SEQ ID NO: 1453 - DNA, 28 bp, Artificial Sequence
  Synthetic
accacgacagtttgccttttggcatgtg

SEQ ID NO: 1454 - DNA, 28 bp, Artificial Sequence
  Synthetic
gaaccacgacagtttgccttttggcatg

SEQ ID NO: 1455 - DNA, 28 bp, Artificial Sequence
  Synthetic
tagaaccacgacagtttgccttttggca

SEQ ID NO: 1456 - DNA, 28 bp, Artificial Sequence
  Synthetic
cctagaaccacgacagtttgccttttgg

SEQ ID NO: 1457 - DNA, 28 bp, Artificial Sequence
  Synthetic
tccctagaaccacgacagtttgcctttt

SEQ ID NO: 1458 - DNA, 28 bp, Artificial Sequence
  Synthetic
actccctagaaccacgacagtttgcctt

SEQ ID NO: 1459 - DNA, 28 bp, Artificial Sequence
  Synthetic
tgactccctagaaccacgacagtttgcc

SEQ ID NO: 1460 - DNA, 28 bp, Artificial Sequence
  Synthetic
cttgactccctagaaccacgacagtttg

SEQ ID NO: 1461 - DNA, 28 bp, Artificial Sequence
  Synthetic
ttcttgactccctagaaccacgacagtt

SEQ ID NO: 1462 - DNA, 28 bp, Artificial Sequence
  Synthetic
ccttcttgactccctagaaccacgacag

SEQ ID NO: 1463 - DNA, 28 bp, Artificial Sequence
  Synthetic
ctccttcttgactccctagaaccacgac

SEQ ID NO: 1464 - DNA, 28 bp, Artificial Sequence
  Synthetic
tgctccttcttgactccctagaaccacg

SEQ ID NO: 1465 - DNA, 28 bp, Artificial Sequence
  Synthetic
actgctccttcttgactccctagaacca

SEQ ID NO: 1466 - DNA, 28 bp, Artificial Sequence
  Synthetic
gaactgctccttcttgactccctagaac

SEQ ID NO: 1467 - DNA, 28 bp, Artificial Sequence
  Synthetic
gtgaactgctccttcttgactccctaga

SEQ ID NO: 1468 - DNA, 28 bp, Artificial Sequence
  Synthetic
gtgtgaactgctccttcttgactcccta

SEQ ID NO: 1469 - DNA, 28 bp, Artificial Sequence
  Synthetic
ccgtgtgaactgctccttcttgactccc

SEQ ID NO: 1470 - DNA, 28 bp, Artificial Sequence
  Synthetic
ggccgtgtgaactgctccttcttgactc

SEQ ID NO: 1471 - DNA, 28 bp, Artificial Sequence
  Synthetic
agggccgtgtgaactgctccttcttgac

SEQ ID NO: 1472 - DNA, 28 bp, Artificial Sequence
  Synthetic
caagggccgtgtgaactgctccttcttg

SEQ ID NO: 1473 - DNA, 28 bp, Artificial Sequence
  Synthetic
agcaagggccgtgtgaactgctccttct

SEQ ID NO: 1474 - DNA, 28 bp, Artificial Sequence
  Synthetic
ccagcaagggccgtgtgaactgctcctt

SEQ ID NO: 1475 - DNA, 28 bp, Artificial Sequence
  Synthetic
ctccagcaagggccgtgtgaactgctcc

SEQ ID NO: 1476 - DNA, 28 bp, Artificial Sequence
  Synthetic
agctccagcaagggccgtgtgaactgct

SEQ ID NO: 1477 - DNA, 28 bp, Artificial Sequence
  Synthetic
agagctccagcaagggccgtgtgaactg

SEQ ID NO: 1478 - DNA, 28 bp, Artificial Sequence
  Synthetic
ccagagctccagcaagggccgtgtgaac

SEQ ID NO: 1479 - DNA, 28 bp, Artificial Sequence
  Synthetic
ctccagagctccagcaagggccgtgtga

SEQ ID NO: 1480 - DNA, 28 bp, Artificial Sequence
  Synthetic
gcctccagagctccagcaagggccgtgt

SEQ ID NO: 1481 - DNA, 28 bp, Artificial Sequence
  Synthetic
cagcctccagagctccagcaagggccgt

SEQ ID NO: 1482 - DNA, 28 bp, Artificial Sequence
  Synthetic
ctcagcctccagagctccagcaagggcc

SEQ ID NO: 1483 - DNA, 28 bp, Artificial Sequence
  Synthetic
atctcagcctccagagctccagcaaggg

SEQ ID NO: 1484 - DNA, 28 bp, Artificial Sequence
  Synthetic
catctcagcctccagagctccagcaagg

SEQ ID NO: 1485 - DNA, 28 bp, Artificial Sequence
  Synthetic
ccatctcagcctccagagctccagcaag

SEQ ID NO: 1486 - DNA, 28 bp, Artificial Sequence
  Synthetic
tccatctcagcctccagagctccagcaa

SEQ ID NO: 1487 - DNA, 28 bp, Artificial Sequence
  Synthetic
atccatctcagcctccagagctccagca

SEQ ID NO: 1488 - DNA, 28 bp, Artificial Sequence
  Synthetic
catccatctcagcctccagagctccagc

SEQ ID NO: 1489 - DNA, 28 bp, Artificial Sequence
  Synthetic
ccatccatctcagcctccagagctccag

SEQ ID NO: 1490 - DNA, 28 bp, Artificial Sequence
  Synthetic
accatccatctcagcctccagagctcca

SEQ ID NO: 1491 - DNA, 28 bp, Artificial Sequence
  Synthetic
caccatccatctcagcctccagagctcc

SEQ ID NO: 1492 - DNA, 28 bp, Artificial Sequence
  Synthetic
gcaccatccatctcagcctccagagctc

SEQ ID NO: 1493 - DNA, 28 bp, Artificial Sequence
  Synthetic
tgcaccatccatctcagcctccagagct

SEQ ID NO: 1494 - DNA, 28 bp, Artificial Sequence
  Synthetic
ttgcaccatccatctcagcctccagagc

SEQ ID NO: 1495 - DNA, 28 bp, Artificial Sequence
  Synthetic
tttgcaccatccatctcagcctccagag

SEQ ID NO: 1496 - DNA, 28 bp, Artificial Sequence
  Synthetic
ctttgcaccatccatctcagcctccaga

SEQ ID NO: 1497 - DNA, 28 bp, Artificial Sequence
  Synthetic
cctttgcaccatccatctcagcctccag

SEQ ID NO: 1498 - DNA, 28 bp, Artificial Sequence
  Synthetic
ccctttgcaccatccatctcagcctcca

SEQ ID NO: 1499 - DNA, 28 bp, Artificial Sequence
  Synthetic
tccctttgcaccatccatctcagcctcc

SEQ ID NO: 1500 - DNA, 28 bp, Artificial Sequence
  Synthetic
ttccctttgcaccatccatctcagcctc

SEQ ID NO: 1501 - DNA, 28 bp, Artificial Sequence
  Synthetic
cttccctttgcaccatccatctcagcct

SEQ ID NO: 1502 - DNA, 28 bp, Artificial Sequence
  Synthetic
ccttccctttgcaccatccatctcagcc

SEQ ID NO: 1503 - DNA, 28 bp, Artificial Sequence
  Synthetic
gccttccctttgcaccatccatctcagc

SEQ ID NO: 1504 - DNA, 28 bp, Artificial Sequence
  Synthetic
agccttccctttgcaccatccatctcag

SEQ ID NO: 1505 - DNA, 28 bp, Artificial Sequence
  Synthetic
cagccttccctttgcaccatccatctca

SEQ ID NO: 1506 - DNA, 28 bp, Artificial Sequence
  Synthetic
acagccttccctttgcaccatccatctc

SEQ ID NO: 1507 - DNA, 28 bp, Artificial Sequence
  Synthetic
gacagccttccctttgcaccatccatct

SEQ ID NO: 1508 - DNA, 28 bp, Artificial Sequence
  Synthetic
ggacagccttccctttgcaccatccatc

SEQ ID NO: 1509 - DNA, 28 bp, Artificial Sequence
  Synthetic
aggacagccttccctttgcaccatccat

SEQ ID NO: 1510 - DNA, 28 bp, Artificial Sequence
  Synthetic
gaggacagccttccctttgcaccatcca

SEQ ID NO: 1511 - DNA, 30 bp, Artificial Sequence
  Synthetic
tttgttgttccagtgtggagttccggtgtc

SEQ ID NO: 1512 - DNA, 30 bp, Artificial Sequence
  Synthetic
ctttgttgttccagtgtggagttccggtgt

SEQ ID NO: 1513 - DNA, 30 bp, Artificial Sequence
  Synthetic
tctttgttgttccagtgtggagttccggtg

SEQ ID NO: 1514 - DNA, 30 bp, Artificial Sequence
  Synthetic
ttctttgttgttccagtgtggagttccggt

SEQ ID NO: 1515 - DNA, 30 bp, Artificial Sequence
  Synthetic
cttctttgttgttccagtgtggagttccgg

SEQ ID NO: 1516 - DNA, 30 bp, Artificial Sequence
  Synthetic
gcttctttgttgttccagtgtggagttccg

SEQ ID NO: 1517 - DNA, 30 bp, Artificial Sequence
  Synthetic
tgcttctttgttgttccagtgtggagttcc

SEQ ID NO: 1518 - DNA, 30 bp, Artificial Sequence
  Synthetic
gtgcttctttgttgttccagtgtggagttc

SEQ ID NO: 1519 - DNA, 30 bp, Artificial Sequence
  Synthetic
agtgcttctttgttgttccagtgtggagtt

SEQ ID NO: 1520 - DNA, 30 bp, Artificial Sequence
  Synthetic
cagtgcttctttgttgttccagtgtggagt

SEQ ID NO: 1521 - DNA, 30 bp, Artificial Sequence
  Synthetic
ccagtgcttctttgttgttccagtgtggag

SEQ ID NO: 1522 - DNA, 30 bp, Artificial Sequence
  Synthetic
accagtgcttctttgttgttccagtgtgga

SEQ ID NO: 1523 - DNA, 30 bp, Artificial Sequence
  Synthetic
taccagtgcttctttgttgttccagtgtgg

SEQ ID NO: 1524 - DNA, 30 bp, Artificial Sequence
  Synthetic
ctaccagtgcttctttgttgttccagtgtg

SEQ ID NO: 1525 - DNA, 30 bp, Artificial Sequence
  Synthetic
tctaccagtgcttctttgttgttccagtgt

SEQ ID NO: 1526 - DNA, 30 bp, Artificial Sequence
  Synthetic
ctctaccagtgcttctttgttgttccagtg

SEQ ID NO: 1527 - DNA, 30 bp, Artificial Sequence
  Synthetic
actctaccagtgcttctttgttgttccagt

SEQ ID NO: 1528 - DNA, 30 bp, Artificial Sequence
  Synthetic
aactctaccagtgcttctttgttgttccag

SEQ ID NO: 1529 - DNA, 30 bp, Artificial Sequence
  Synthetic
gaactctaccagtgcttctttgttgttcca

SEQ ID NO: 1530 - DNA, 30 bp, Artificial Sequence
  Synthetic
tgaactctaccagtgcttctttgttgttcc

SEQ ID NO: 1531 - DNA, 30 bp, Artificial Sequence
  Synthetic
cttgaactctaccagtgcttctttgttgtt

SEQ ID NO: 1532 - DNA, 30 bp, Artificial Sequence
  Synthetic
tccttgaactctaccagtgcttctttgttg

SEQ ID NO: 1533 - DNA, 30 bp, Artificial Sequence
  Synthetic
cgtccttgaactctaccagtgcttctttgt

SEQ ID NO: 1534 - DNA, 30 bp, Artificial Sequence
  Synthetic
tgcgtccttgaactctaccagtgcttcttt

SEQ ID NO: 1535 - DNA, 30 bp, Artificial Sequence
  Synthetic
tgtgcgtccttgaactctaccagtgcttct

SEQ ID NO: 1536 - DNA, 30 bp, Artificial Sequence
  Synthetic
catgtgcgtccttgaactctaccagtgctt

SEQ ID NO: 1537 - DNA, 30 bp, Artificial Sequence
  Synthetic
ggcatgtgcgtccttgaactctaccagtgc

SEQ ID NO: 1538 - DNA, 30 bp, Artificial Sequence
  Synthetic
ttggcatgtgcgtccttgaactctaccagt

SEQ ID NO: 1539 - DNA, 30 bp, Artificial Sequence
  Synthetic
ttttggcatgtgcgtccttgaactctacca

SEQ ID NO: 1540 - DNA, 30 bp, Artificial Sequence
  Synthetic
ccttttggcatgtgcgtccttgaactctac

SEQ ID NO: 1541 - DNA, 30 bp, Artificial Sequence
  Synthetic
tgccttttggcatgtgcgtccttgaactct

SEQ ID NO: 1542 - DNA, 30 bp, Artificial Sequence
  Synthetic
tttgccttttggcatgtgcgtccttgaact

SEQ ID NO: 1543 - DNA, 30 bp, Artificial Sequence
  Synthetic
agtttgccttttggcatgtgcgtccttgaa

SEQ ID NO: 1544 - DNA, 30 bp, Artificial Sequence
  Synthetic
acagtttgccttttggcatgtgcgtccttg

SEQ ID NO: 1545 - DNA, 30 bp, Artificial Sequence
  Synthetic
cgacagtttgccttttggcatgtgcgtcct

SEQ ID NO: 1546 - DNA, 30 bp, Artificial Sequence
  Synthetic
cacgacagtttgccttttggcatgtgcgtc

SEQ ID NO: 1547 - DNA, 30 bp, Artificial Sequence
  Synthetic
accacgacagtttgccttttggcatgtgcg

SEQ ID NO: 1548 - DNA, 30 bp, Artificial Sequence
  Synthetic
gaaccacgacagtttgccttttggcatgtg

SEQ ID NO: 1549 - DNA, 30 bp, Artificial Sequence
  Synthetic
tagaaccacgacagtttgccttttggcatg

SEQ ID NO: 1550 - DNA, 30 bp, Artificial Sequence
  Synthetic
cctagaaccacgacagtttgccttttggca

SEQ ID NO: 1551 - DNA, 30 bp, Artificial Sequence
  Synthetic
tccctagaaccacgacagtttgccttttgg

SEQ ID NO: 1552 - DNA, 30 bp, Artificial Sequence
  Synthetic
actccctagaaccacgacagtttgcctttt

SEQ ID NO: 1553 - DNA, 30 bp, Artificial Sequence
  Synthetic
tgactccctagaaccacgacagtttgcctt

SEQ ID NO: 1554 - DNA, 30 bp, Artificial Sequence
  Synthetic
cttgactccctagaaccacgacagtttgcc

SEQ ID NO: 1555 - DNA, 30 bp, Artificial Sequence
  Synthetic
ttcttgactccctagaaccacgacagtttg

SEQ ID NO: 1556 - DNA, 30 bp, Artificial Sequence
  Synthetic
ccttcttgactccctagaaccacgacagtt

SEQ ID NO: 1557 - DNA, 30 bp, Artificial Sequence
  Synthetic
ctccttcttgactccctagaaccacgacag

SEQ ID NO: 1558 - DNA, 30 bp, Artificial Sequence
  Synthetic
tgctccttcttgactccctagaaccacgac

SEQ ID NO: 1559 - DNA, 30 bp, Artificial Sequence
  Synthetic
actgctccttcttgactccctagaaccacg

SEQ ID NO: 1560 - DNA, 30 bp, Artificial Sequence
  Synthetic
gaactgctccttcttgactccctagaacca

SEQ ID NO: 1561 - DNA, 30 bp, Artificial Sequence
  Synthetic
gtgaactgctccttcttgactccctagaac

SEQ ID NO: 1562 - DNA, 30 bp, Artificial Sequence
  Synthetic
gtgtgaactgctccttcttgactccctaga

SEQ ID NO: 1563 - DNA, 30 bp, Artificial Sequence
  Synthetic
ccgtgtgaactgctccttcttgactcccta

SEQ ID NO: 1564 - DNA, 30 bp, Artificial Sequence
  Synthetic
ggccgtgtgaactgctccttcttgactccc

SEQ ID NO: 1565 - DNA, 30 bp, Artificial Sequence
  Synthetic
agggccgtgtgaactgctccttcttgactc

SEQ ID NO: 1566 - DNA, 30 bp, Artificial Sequence
  Synthetic
caagggccgtgtgaactgctccttcttgac

SEQ ID NO: 1567 - DNA, 30 bp, Artificial Sequence
  Synthetic
agcaagggccgtgtgaactgctccttcttg

SEQ ID NO: 1568 - DNA, 30 bp, Artificial Sequence
  Synthetic
ccagcaagggccgtgtgaactgctccttct

SEQ ID NO: 1569 - DNA, 30 bp, Artificial Sequence
  Synthetic
ctccagcaagggccgtgtgaactgctcctt

SEQ ID NO: 1570 - DNA, 30 bp, Artificial Sequence
  Synthetic
agctccagcaagggccgtgtgaactgctcc

SEQ ID NO: 1571 - DNA, 30 bp, Artificial Sequence
  Synthetic
agagctccagcaagggccgtgtgaactgct

SEQ ID NO: 1572 - DNA, 30 bp, Artificial Sequence
  Synthetic
ccagagctccagcaagggccgtgtgaactg

SEQ ID NO: 1573 - DNA, 30 bp, Artificial Sequence
  Synthetic
ctccagagctccagcaagggccgtgtgaac

SEQ ID NO: 1574 - DNA, 30 bp, Artificial Sequence
  Synthetic
gcctccagagctccagcaagggccgtgtga

SEQ ID NO: 1575 - DNA, 30 bp, Artificial Sequence
  Synthetic
cagcctccagagctccagcaagggccgtgt

SEQ ID NO: 1576 - DNA, 30 bp, Artificial Sequence
  Synthetic
ctcagcctccagagctccagcaagggccgt

SEQ ID NO: 1577 - DNA, 30 bp, Artificial Sequence
  Synthetic
atctcagcctccagagctccagcaagggcc

SEQ ID NO: 1578 - DNA, 30 bp, Artificial Sequence
  Synthetic
ccatctcagcctccagagctccagcaaggg

SEQ ID NO: 1579 - DNA, 30 bp, Artificial Sequence
  Synthetic
tccatctcagcctccagagctccagcaagg

SEQ ID NO: 1580 - DNA, 30 bp, Artificial Sequence
  Synthetic
atccatctcagcctccagagctccagcaag

SEQ ID NO: 1581 - DNA, 30 bp, Artificial Sequence
  Synthetic
catccatctcagcctccagagctccagcaa

SEQ ID NO: 1582 - DNA, 30 bp, Artificial Sequence
  Synthetic
ccatccatctcagcctccagagctccagca

SEQ ID NO: 1583 - DNA, 30 bp, Artificial Sequence
  Synthetic
accatccatctcagcctccagagctccagc

SEQ ID NO: 1584 - DNA, 30 bp, Artificial Sequence
  Synthetic
caccatccatctcagcctccagagctccag

SEQ ID NO: 1585 - DNA, 30 bp, Artificial Sequence
  Synthetic
gcaccatccatctcagcctccagagctcca

SEQ ID NO: 1586 - DNA, 30 bp, Artificial Sequence
  Synthetic
tgcaccatccatctcagcctccagagctcc

SEQ ID NO: 1587 - DNA, 30 bp, Artificial Sequence
  Synthetic
ttgcaccatccatctcagcctccagagctc

SEQ ID NO: 1588 - DNA, 30 bp, Artificial Sequence
  Synthetic
tttgcaccatccatctcagcctccagagct

SEQ ID NO: 1589 - DNA, 30 bp, Artificial Sequence
  Synthetic
ctttgcaccatccatctcagcctccagagc

SEQ ID NO: 1590 - DNA, 30 bp, Artificial Sequence
  Synthetic
cctttgcaccatccatctcagcctccagag

SEQ ID NO: 1591 - DNA, 30 bp, Artificial Sequence
  Synthetic
ccctttgcaccatccatctcagcctccaga

SEQ ID NO: 1592 - DNA, 30 bp, Artificial Sequence
  Synthetic
tccctttgcaccatccatctcagcctccag

SEQ ID NO: 1593 - DNA, 30 bp, Artificial Sequence
  Synthetic
ttccctttgcaccatccatctcagcctcca

SEQ ID NO: 1594 - DNA, 30 bp, Artificial Sequence
  Synthetic
cttccctttgcaccatccatctcagcctcc

SEQ ID NO: 1595 - DNA, 30 bp, Artificial Sequence
  Synthetic
ccttccctttgcaccatccatctcagcctc

SEQ ID NO: 1596 - DNA, 30 bp, Artificial Sequence
  Synthetic
gccttccctttgcaccatccatctcagcct

SEQ ID NO: 1597 - DNA, 30 bp, Artificial Sequence
  Synthetic
agccttccctttgcaccatccatctcagcc

SEQ ID NO: 1598 - DNA, 30 bp, Artificial Sequence
  Synthetic
cagccttccctttgcaccatccatctcagc

SEQ ID NO: 1599 - DNA, 30 bp, Artificial Sequence
  Synthetic
acagccttccctttgcaccatccatctcag

SEQ ID NO: 1600 - DNA, 30 bp, Artificial Sequence
  Synthetic
gacagccttccctttgcaccatccatctca

SEQ ID NO: 1601 - DNA, 30 bp, Artificial Sequence
  Synthetic
ggacagccttccctttgcaccatccatctc

SEQ ID NO: 1602 - DNA, 30 bp, Artificial Sequence
  Synthetic
aggacagccttccctttgcaccatccatct

SEQ ID NO: 1603 - DNA, 30 bp, Artificial Sequence
  Synthetic
gaggacagccttccctttgcaccatccatc

SEQ ID NO: 1604 - DNA, 30 bp, Artificial Sequence
  Synthetic
agaggacagccttccctttgcaccatccat

SEQ ID NO: 1605 - DNA, 30 bp, Artificial Sequence
  Synthetic
cagaggacagccttccctttgcaccatcca

SEQ ID NO: 1606 - DNA, 30 bp, Artificial Sequence
  Synthetic
tgttgagaggttggcccctgaatatgtact

SEQ ID NO: 1607 - DNA, 30 bp, Artificial Sequence
  Synthetic
ttgttgagaggttggcccctgaatatgtac

SEQ ID NO: 1608 - DNA, 30 bp, Artificial Sequence
  Synthetic
attgttgagaggttggcccctgaatatgta

SEQ ID NO: 1609 - DNA, 30 bp, Artificial Sequence
  Synthetic
cattgttgagaggttggcccctgaatatgt

SEQ ID NO: 1610 - DNA, 30 bp, Artificial Sequence
  Synthetic
tcattgttgagaggttggcccctgaatatg

SEQ ID NO: 1611 - DNA, 30 bp, Artificial Sequence
  Synthetic
gtcattgttgagaggttggcccctgaatat

SEQ ID NO: 1612 - DNA, 30 bp, Artificial Sequence
  Synthetic
cgtcattgttgagaggttggcccctgaata

SEQ ID NO: 1613 - DNA, 30 bp, Artificial Sequence
  Synthetic
tcgtcattgttgagaggttggcccctgaat

SEQ ID NO: 1614 - DNA, 30 bp, Artificial Sequence
  Synthetic
ttcgtcattgttgagaggttggcccctgaa

SEQ ID NO: 1615 - DNA, 30 bp, Artificial Sequence
  Synthetic
cttcgtcattgttgagaggttggcccctga

SEQ ID NO: 1616 - DNA, 30 bp, Artificial Sequence
  Synthetic
tcttcgtcattgttgagaggttggcccctg

SEQ ID NO: 1617 - DNA, 30 bp, Artificial Sequence
  Synthetic
gtcttcgtcattgttgagaggttggcccct

SEQ ID NO: 1618 - DNA, 30 bp, Artificial Sequence
  Synthetic
ggtcttcgtcattgttgagaggttggcccc

SEQ ID NO: 1619 - DNA, 30 bp, Artificial Sequence
  Synthetic
tggtcttcgtcattgttgagaggttggccc

SEQ ID NO: 1620 - DNA, 30 bp, Artificial Sequence
  Synthetic
atggtcttcgtcattgttgagaggttggcc

SEQ ID NO: 1621 - DNA, 30 bp, Artificial Sequence
  Synthetic
catggtcttcgtcattgttgagaggttggc

SEQ ID NO: 1622 - DNA, 30 bp, Artificial Sequence
  Synthetic
gcatggtcttcgtcattgttgagaggttgg

SEQ ID NO: 1623 - DNA, 30 bp, Artificial Sequence
  Synthetic
agcatggtcttcgtcattgttgagaggttg

SEQ ID NO: 1624 - DNA, 30 bp, Artificial Sequence
  Synthetic
gagcatggtcttcgtcattgttgagaggtt

SEQ ID NO: 1625 - DNA, 30 bp, Artificial Sequence
  Synthetic
tgagcatggtcttcgtcattgttgagaggt

SEQ ID NO: 1626 - DNA, 30 bp, Artificial Sequence
  Synthetic
agtgagcatggtcttcgtcattgttgagag

SEQ ID NO: 1627 - DNA, 30 bp, Artificial Sequence
  Synthetic
ccagtgagcatggtcttcgtcattgttgag

SEQ ID NO: 1628 - DNA, 30 bp, Artificial Sequence
  Synthetic
gtccagtgagcatggtcttcgtcattgttg

SEQ ID NO: 1629 - DNA, 30 bp, Artificial Sequence
  Synthetic
ctgtccagtgagcatggtcttcgtcattgt

SEQ ID NO: 1630 - DNA, 30 bp, Artificial Sequence
  Synthetic
ttctgtccagtgagcatggtcttcgtcatt

SEQ ID NO: 1631 - DNA, 30 bp, Artificial Sequence
  Synthetic
gcttctgtccagtgagcatggtcttcgtca

SEQ ID NO: 1632 - DNA, 30 bp, Artificial Sequence
  Synthetic
ttgcttctgtccagtgagcatggtcttcgt

SEQ ID NO: 1633 - DNA, 30 bp, Artificial Sequence
  Synthetic
ttttgcttctgtccagtgagcatggtcttc

SEQ ID NO: 1634 - DNA, 30 bp, Artificial Sequence
  Synthetic
atttttgcttctgtccagtgagcatggtct

SEQ ID NO: 1635 - DNA, 30 bp, Artificial Sequence
  Synthetic
gcatttttgcttctgtccagtgagcatggt

SEQ ID NO: 1636 - DNA, 30 bp, Artificial Sequence
  Synthetic
cagcatttttgcttctgtccagtgagcatg

SEQ ID NO: 1637 - DNA, 30 bp, Artificial Sequence
  Synthetic
agcagcatttttgcttctgtccagtgagca

SEQ ID NO: 1638 - DNA, 30 bp, Artificial Sequence
  Synthetic
ccagcagcatttttgcttctgtccagtgag

SEQ ID NO: 1639 - DNA, 30 bp, Artificial Sequence
  Synthetic
gtccagcagcatttttgcttctgtccagtg

SEQ ID NO: 1640 - DNA, 30 bp, Artificial Sequence
  Synthetic
ttgtccagcagcatttttgcttctgtccag

SEQ ID NO: 1641 - DNA, 30 bp, Artificial Sequence
  Synthetic
tgttgtccagcagcatttttgcttctgtcc

SEQ ID NO: 1642 - DNA, 30 bp, Artificial Sequence
  Synthetic
gatgttgtccagcagcatttttgcttctgt

SEQ ID NO: 1643 - DNA, 30 bp, Artificial Sequence
  Synthetic
ttgatgttgtccagcagcatttttgcttct

SEQ ID NO: 1644 - DNA, 30 bp, Artificial Sequence
  Synthetic
tgttgatgttgtccagcagcatttttgctt

SEQ ID NO: 1645 - DNA, 30 bp, Artificial Sequence
  Synthetic
tgtgttgatgttgtccagcagcatttttgc

SEQ ID NO: 1646 - DNA, 30 bp, Artificial Sequence
  Synthetic
ggtgtgttgatgttgtccagcagcattttt

SEQ ID NO: 1647 - DNA, 30 bp, Artificial Sequence
  Synthetic
ctggtgtgttgatgttgtccagcagcattt

SEQ ID NO: 1648 - DNA, 30 bp, Artificial Sequence
  Synthetic
ttctggtgtgttgatgttgtccagcagcat

SEQ ID NO: 1649 - DNA, 30 bp, Artificial Sequence
  Synthetic
ccttctggtgtgttgatgttgtccagcagc

SEQ ID NO: 1650 - DNA, 30 bp, Artificial Sequence
  Synthetic
tcccttctggtgtgttgatgttgtccagca

SEQ ID NO: 1651 - DNA, 30 bp, Artificial Sequence
  Synthetic
aatcccttctggtgtgttgatgttgtccag

SEQ ID NO: 1652 - DNA, 30 bp, Artificial Sequence
  Synthetic
ataatcccttctggtgtgttgatgttgtcc

SEQ ID NO: 1653 - DNA, 30 bp, Artificial Sequence
  Synthetic
gtataatcccttctggtgtgttgatgttgt

SEQ ID NO: 1654 - DNA, 30 bp, Artificial Sequence
  Synthetic
tggtataatcccttctggtgtgttgatgtt

SEQ ID NO: 1655 - DNA, 30 bp, Artificial Sequence
  Synthetic
gctggtataatcccttctggtgtgttgatg

SEQ ID NO: 1656 - DNA, 30 bp, Artificial Sequence
  Synthetic
gagctggtataatcccttctggtgtgttga

SEQ ID NO: 1657 - DNA, 30 bp, Artificial Sequence
  Synthetic
gagagctggtataatcccttctggtgtgtt

SEQ ID NO: 1658 - DNA, 30 bp, Artificial Sequence
  Synthetic
aagagagctggtataatcccttctggtgtg

SEQ ID NO: 1659 - DNA, 30 bp, Artificial Sequence
  Synthetic
caaagagagctggtataatcccttctggtg

SEQ ID NO: 1660 - DNA, 30 bp, Artificial Sequence
  Synthetic
ttcaaagagagctggtataatcccttctgg

SEQ ID NO: 1661 - DNA, 30 bp, Artificial Sequence
  Synthetic
ggttcaaagagagctggtataatcccttct

SEQ ID NO: 1662 - DNA, 30 bp, Artificial Sequence
  Synthetic
ctggttcaaagagagctggtataatccctt

SEQ ID NO: 1663 - DNA, 30 bp, Artificial Sequence
  Synthetic
ttctggttcaaagagagctggtataatccc

SEQ ID NO: 1664 - DNA, 30 bp, Artificial Sequence
  Synthetic
ctttctggttcaaagagagctggtataatc

SEQ ID NO: 1665 - DNA, 30 bp, Artificial Sequence
  Synthetic
ccctttctggttcaaagagagctggtataa

SEQ ID NO: 1666 - DNA, 30 bp, Artificial Sequence
  Synthetic
ctccctttctggttcaaagagagctggtat

SEQ ID NO: 1667 - DNA, 30 bp, Artificial Sequence
  Synthetic
ttctccctttctggttcaaagagagctggt

SEQ ID NO: 1668 - DNA, 30 bp, Artificial Sequence
  Synthetic
acttctccctttctggttcaaagagagctg

SEQ ID NO: 1669 - DNA, 30 bp, Artificial Sequence
  Synthetic
tgacttctccctttctggttcaaagagagc

SEQ ID NO: 1670 - DNA, 30 bp, Artificial Sequence
  Synthetic
gctgacttctccctttctggttcaaagaga

SEQ ID NO: 1671 - DNA, 30 bp, Artificial Sequence
  Synthetic
ggctgacttctccctttctggttcaaagag

SEQ ID NO: 1672 - DNA, 30 bp, Artificial Sequence
  Synthetic
cggctgacttctccctttctggttcaaaga

SEQ ID NO: 1673 - DNA, 30 bp, Artificial Sequence
  Synthetic
gcggctgacttctccctttctggttcaaag

SEQ ID NO: 1674 - DNA, 30 bp, Artificial Sequence
  Synthetic
ggcggctgacttctccctttctggttcaaa

SEQ ID NO: 1675 - DNA, 30 bp, Artificial Sequence
  Synthetic
tggcggctgacttctccctttctggttcaa

SEQ ID NO: 1676 - DNA, 30 bp, Artificial Sequence
  Synthetic
atggcggctgacttctccctttctggttca

SEQ ID NO: 1677 - DNA, 30 bp, Artificial Sequence
  Synthetic
tatggcggctgacttctccctttctggttc

SEQ ID NO: 1678 - DNA, 30 bp, Artificial Sequence
  Synthetic
ctatggcggctgacttctccctttctggtt

SEQ ID NO: 1679 - DNA, 30 bp, Artificial Sequence
  Synthetic
tctatggcggctgacttctccctttctggt

SEQ ID NO: 1680 - DNA, 30 bp, Artificial Sequence
  Synthetic
gtctatggcggctgacttctccctttctgg

SEQ ID NO: 1681 - DNA, 30 bp, Artificial Sequence
  Synthetic
cgtctatggcggctgacttctccctttctg

SEQ ID NO: 1682 - DNA, 30 bp, Artificial Sequence
  Synthetic
ccgtctatggcggctgacttctccctttct

SEQ ID NO: 1683 - DNA, 30 bp, Artificial Sequence
  Synthetic
accgtctatggcggctgacttctccctttc

SEQ ID NO: 1684 - DNA, 30 bp, Artificial Sequence
  Synthetic
caccgtctatggcggctgacttctcccttt

SEQ ID NO: 1685 - DNA, 30 bp, Artificial Sequence
  Synthetic
tcaccgtctatggcggctgacttctccctt

SEQ ID NO: 1686 - DNA, 30 bp, Artificial Sequence
  Synthetic
ttcaccgtctatggcggctgacttctccct

SEQ ID NO: 1687 - DNA, 30 bp, Artificial Sequence
  Synthetic
attcaccgtctatggcggctgacttctccc

SEQ ID NO: 1688 - DNA, 30 bp, Artificial Sequence
  Synthetic
tattcaccgtctatggcggctgacttctcc

SEQ ID NO: 1689 - DNA, 30 bp, Artificial Sequence
  Synthetic
gtattcaccgtctatggcggctgacttctc

SEQ ID NO: 1690 - DNA, 30 bp, Artificial Sequence
  Synthetic
ggtattcaccgtctatggcggctgacttct

SEQ ID NO: 1691 - DNA, 30 bp, Artificial Sequence
  Synthetic
cggtattcaccgtctatggcggctgacttc

SEQ ID NO: 1692 - DNA, 30 bp, Artificial Sequence
  Synthetic
gcggtattcaccgtctatggcggctgactt

SEQ ID NO: 1693 - DNA, 30 bp, Artificial Sequence
  Synthetic
ggcggtattcaccgtctatggcggctgact

SEQ ID NO: 1694 - DNA, 30 bp, Artificial Sequence
  Synthetic
aggcggtattcaccgtctatggcggctgac

SEQ ID NO: 1695 - DNA, 30 bp, Artificial Sequence
  Synthetic
caggcggtattcaccgtctatggcggctga

SEQ ID NO: 1696 - DNA, 30 bp, Artificial Sequence
  Synthetic
tcaggcggtattcaccgtctatggcggctg

SEQ ID NO: 1697 - DNA, 30 bp, Artificial Sequence
  Synthetic
ttcaggcggtattcaccgtctatggcggct

SEQ ID NO: 1698 - DNA, 30 bp, Artificial Sequence
  Synthetic
cttcaggcggtattcaccgtctatggcggc

SEQ ID NO: 1699 - DNA, 30 bp, Artificial Sequence
  Synthetic
ccttcaggcggtattcaccgtctatggcgg

SEQ ID NO: 1700 - DNA, 30 bp, Artificial Sequence
  Synthetic
cccttcaggcggtattcaccgtctatggcg

SEQ ID NO: 1701 - DNA, 30 bp, Artificial Sequence
  Synthetic
attaatttaacagtatcaccatcaatcgct

SEQ ID NO: 1702 - DNA, 30 bp, Artificial Sequence
  Synthetic
cattaatttaacagtatcaccatcaatcgc

SEQ ID NO: 1703 - DNA, 30 bp, Artificial Sequence
  Synthetic
acattaatttaacagtatcaccatcaatcg

SEQ ID NO: 1704 - DNA, 30 bp, Artificial Sequence
  Synthetic
tacattaatttaacagtatcaccatcaatc

SEQ ID NO: 1705 - DNA, 30 bp, Artificial Sequence
  Synthetic
gtacattaatttaacagtatcaccatcaat

SEQ ID NO: 1706 - DNA, 30 bp, Artificial Sequence
  Synthetic
tgtacattaatttaacagtatcaccatcaa

SEQ ID NO: 1707 - DNA, 30 bp, Artificial Sequence
  Synthetic
ttgtacattaatttaacagtatcaccatca

SEQ ID NO: 1708 - DNA, 30 bp, Artificial Sequence
  Synthetic
tttgtacattaatttaacagtatcaccatc

SEQ ID NO: 1709 - DNA, 30 bp, Artificial Sequence
  Synthetic
ctttgtacattaatttaacagtatcaccat

SEQ ID NO: 1710 - DNA, 30 bp, Artificial Sequence
  Synthetic
cctttgtacattaatttaacagtatcacca

SEQ ID NO: 1711 - DNA, 30 bp, Artificial Sequence
  Synthetic
acctttgtacattaatttaacagtatcacc

SEQ ID NO: 1712 - DNA, 30 bp, Artificial Sequence
  Synthetic
gacctttgtacattaatttaacagtatcac

SEQ ID NO: 1713 - DNA, 30 bp, Artificial Sequence
  Synthetic
tgacctttgtacattaatttaacagtatca

SEQ ID NO: 1714 - DNA, 30 bp, Artificial Sequence
  Synthetic
ttgacctttgtacattaatttaacagtatc

SEQ ID NO: 1715 - DNA, 30 bp, Artificial Sequence
  Synthetic
gttgacctttgtacattaatttaacagtat

SEQ ID NO: 1716 - DNA, 30 bp, Artificial Sequence
  Synthetic
ggttgacctttgtacattaatttaacagta

SEQ ID NO: 1717 - DNA, 30 bp, Artificial Sequence
  Synthetic
tggttgacctttgtacattaatttaacagt

SEQ ID NO: 1718 - DNA, 30 bp, Artificial Sequence
  Synthetic
ttggttgacctttgtacattaatttaacag

SEQ ID NO: 1719 - DNA, 30 bp, Artificial Sequence
  Synthetic
attggttgacctttgtacattaatttaaca

SEQ ID NO: 1720 - DNA, 30 bp, Artificial Sequence
  Synthetic
cattggttgacctttgtacattaatttaac

SEQ ID NO: 1721 - DNA, 30 bp, Artificial Sequence
  Synthetic
gtcattggttgacctttgtacattaattta

SEQ ID NO: 1722 - DNA, 30 bp, Artificial Sequence
  Synthetic
atgtcattggttgacctttgtacattaatt

SEQ ID NO: 1723 - DNA, 30 bp, Artificial Sequence
  Synthetic
gaatgtcattggttgacctttgtacattaa

SEQ ID NO: 1724 - DNA, 30 bp, Artificial Sequence
  Synthetic
ctgaatgtcattggttgacctttgtacatt

SEQ ID NO: 1725 - DNA, 30 bp, Artificial Sequence
  Synthetic
gtctgaatgtcattggttgacctttgtaca

SEQ ID NO: 1726 - DNA, 30 bp, Artificial Sequence
  Synthetic
tagtctgaatgtcattggttgacctttgta

SEQ ID NO: 1727 - DNA, 30 bp, Artificial Sequence
  Synthetic
aatagtctgaatgtcattggttgacctttg

SEQ ID NO: 1728 - DNA, 30 bp, Artificial Sequence
  Synthetic
ataatagtctgaatgtcattggttgacctt

SEQ ID NO: 1729 - DNA, 30 bp, Artificial Sequence
  Synthetic
caataatagtctgaatgtcattggttgacc

SEQ ID NO: 1730 - DNA, 30 bp, Artificial Sequence
  Synthetic
accaataatagtctgaatgtcattggttga

SEQ ID NO: 1731 - DNA, 30 bp, Artificial Sequence
  Synthetic
caaccaataatagtctgaatgtcattggtt

SEQ ID NO: 1732 - DNA, 30 bp, Artificial Sequence
  Synthetic
atcaaccaataatagtctgaatgtcattgg

SEQ ID NO: 1733 - DNA, 30 bp, Artificial Sequence
  Synthetic
gtatcaaccaataatagtctgaatgtcatt

SEQ ID NO: 1734 - DNA, 30 bp, Artificial Sequence
  Synthetic
gtgtatcaaccaataatagtctgaatgtca

SEQ ID NO: 1735 - DNA, 30 bp, Artificial Sequence
  Synthetic
aggtgtatcaaccaataatagtctgaatgt

SEQ ID NO: 1736 - DNA, 30 bp, Artificial Sequence
  Synthetic
tcaggtgtatcaaccaataatagtctgaat

SEQ ID NO: 1737 - DNA, 30 bp, Artificial Sequence
  Synthetic
tttcaggtgtatcaaccaataatagtctga

SEQ ID NO: 1738 - DNA, 30 bp, Artificial Sequence
  Synthetic
tgtttcaggtgtatcaaccaataatagtct

SEQ ID NO: 1739 - DNA, 30 bp, Artificial Sequence
  Synthetic
tttgtttcaggtgtatcaaccaataatagt

SEQ ID NO: 1740 - DNA, 30 bp, Artificial Sequence
  Synthetic
gctttgtttcaggtgtatcaaccaataata

SEQ ID NO: 1741 - DNA, 30 bp, Artificial Sequence
  Synthetic
atgctttgtttcaggtgtatcaaccaataa

SEQ ID NO: 1742 - DNA, 30 bp, Artificial Sequence
  Synthetic
ggatgctttgtttcaggtgtatcaaccaat

SEQ ID NO: 1743 - DNA, 30 bp, Artificial Sequence
  Synthetic
taggatgctttgtttcaggtgtatcaacca

SEQ ID NO: 1744 - DNA, 30 bp, Artificial Sequence
  Synthetic
tttaggatgctttgtttcaggtgtatcaac

SEQ ID NO: 1745 - DNA, 30 bp, Artificial Sequence
  Synthetic
tttttaggatgctttgtttcaggtgtatca

SEQ ID NO: 1746 - DNA, 30 bp, Artificial Sequence
  Synthetic
cttttttaggatgctttgtttcaggtgtat

SEQ ID NO: 1747 - DNA, 30 bp, Artificial Sequence
  Synthetic
accttttttaggatgctttgtttcaggtgt

SEQ ID NO: 1748 - DNA, 30 bp, Artificial Sequence
  Synthetic
acaccttttttaggatgctttgtttcaggt

SEQ ID NO: 1749 - DNA, 30 bp, Artificial Sequence
  Synthetic
ctacaccttttttaggatgctttgtttcag

SEQ ID NO: 1750 - DNA, 30 bp, Artificial Sequence
  Synthetic
ctctacaccttttttaggatgctttgtttc

SEQ ID NO: 1751 - DNA, 30 bp, Artificial Sequence
  Synthetic
ttctctacaccttttttaggatgctttgtt

SEQ ID NO: 1752 - DNA, 30 bp, Artificial Sequence
  Synthetic
atttctctacaccttttttaggatgctttg

SEQ ID NO: 1753 - DNA, 30 bp, Artificial Sequence
  Synthetic
atatttctctacaccttttttaggatgctt

SEQ ID NO: 1754 - DNA, 30 bp, Artificial Sequence
  Synthetic
ccatatttctctacaccttttttaggatgc

SEQ ID NO: 1755 - DNA, 30 bp, Artificial Sequence
  Synthetic
gaccatatttctctacaccttttttaggat

SEQ ID NO: 1756 - DNA, 30 bp, Artificial Sequence
  Synthetic
aggaccatatttctctacaccttttttagg

SEQ ID NO: 1757 - DNA, 30 bp, Artificial Sequence
  Synthetic
tcaggaccatatttctctacacctttttta

SEQ ID NO: 1758 - DNA, 30 bp, Artificial Sequence
  Synthetic
cttcaggaccatatttctctacaccttttt

SEQ ID NO: 1759 - DNA, 30 bp, Artificial Sequence
  Synthetic
tgcttcaggaccatatttctctacaccttt

SEQ ID NO: 1760 - DNA, 30 bp, Artificial Sequence
  Synthetic
cttgcttcaggaccatatttctctacacct

SEQ ID NO: 1761 - DNA, 30 bp, Artificial Sequence
  Synthetic
cacttgcttcaggaccatatttctctacac

SEQ ID NO: 1762 - DNA, 30 bp, Artificial Sequence
  Synthetic
tgcacttgcttcaggaccatatttctctac

SEQ ID NO: 1763 - DNA, 30 bp, Artificial Sequence
  Synthetic
aatgcacttgcttcaggaccatatttctct

SEQ ID NO: 1764 - DNA, 30 bp, Artificial Sequence
  Synthetic
taaatgcacttgcttcaggaccatatttct

SEQ ID NO: 1765 - DNA, 30 bp, Artificial Sequence
  Synthetic
cgtaaatgcacttgcttcaggaccatattt

SEQ ID NO: 1766 - DNA, 30 bp, Artificial Sequence
  Synthetic
tcgtaaatgcacttgcttcaggaccatatt

SEQ ID NO: 1767 - DNA, 30 bp, Artificial Sequence
  Synthetic
ttcgtaaatgcacttgcttcaggaccatat

SEQ ID NO: 1768 - DNA, 30 bp, Artificial Sequence
  Synthetic
tttcgtaaatgcacttgcttcaggaccata

SEQ ID NO: 1769 - DNA, 30 bp, Artificial Sequence
  Synthetic
ttttcgtaaatgcacttgcttcaggaccat

SEQ ID NO: 1770 - DNA, 30 bp, Artificial Sequence
  Synthetic
tttttcgtaaatgcacttgcttcaggacca

SEQ ID NO: 1771 - DNA, 30 bp, Artificial Sequence
  Synthetic
ctttttcgtaaatgcacttgcttcaggacc

SEQ ID NO: 1772 - DNA, 30 bp, Artificial Sequence
  Synthetic
tctttttcgtaaatgcacttgcttcaggac

SEQ ID NO: 1773 - DNA, 30 bp, Artificial Sequence
  Synthetic
atctttttcgtaaatgcacttgcttcagga

SEQ ID NO: 1774 - DNA, 30 bp, Artificial Sequence
  Synthetic
catctttttcgtaaatgcacttgcttcagg

SEQ ID NO: 1775 - DNA, 30 bp, Artificial Sequence
  Synthetic
ccatctttttcgtaaatgcacttgcttcag

SEQ ID NO: 1776 - DNA, 30 bp, Artificial Sequence
  Synthetic
accatctttttcgtaaatgcacttgcttca

SEQ ID NO: 1777 - DNA, 30 bp, Artificial Sequence
  Synthetic
taccatctttttcgtaaatgcacttgcttc

SEQ ID NO: 1778 - DNA, 30 bp, Artificial Sequence
  Synthetic
ctaccatctttttcgtaaatgcacttgctt

SEQ ID NO: 1779 - DNA, 30 bp, Artificial Sequence
  Synthetic
tctaccatctttttcgtaaatgcacttgct

SEQ ID NO: 1780 - DNA, 30 bp, Artificial Sequence
  Synthetic
ttctaccatctttttcgtaaatgcacttgc

SEQ ID NO: 1781 - DNA, 30 bp, Artificial Sequence
  Synthetic
tttctaccatctttttcgtaaatgcacttg

SEQ ID NO: 1782 - DNA, 30 bp, Artificial Sequence
  Synthetic
ttttctaccatctttttcgtaaatgcactt

SEQ ID NO: 1783 - DNA, 30 bp, Artificial Sequence
  Synthetic
attttctaccatctttttcgtaaatgcact

SEQ ID NO: 1784 - DNA, 30 bp, Artificial Sequence
  Synthetic
cattttctaccatctttttcgtaaatgcac

SEQ ID NO: 1785 - DNA, 30 bp, Artificial Sequence
  Synthetic
gcattttctaccatctttttcgtaaatgca

SEQ ID NO: 1786 - DNA, 30 bp, Artificial Sequence
  Synthetic
tgcattttctaccatctttttcgtaaatgc

SEQ ID NO: 1787 - DNA, 30 bp, Artificial Sequence
  Synthetic
ttgcattttctaccatctttttcgtaaatg

SEQ ID NO: 1788 - DNA, 30 bp, Artificial Sequence
  Synthetic
tttgcattttctaccatctttttcgtaaat

SEQ ID NO: 1789 - DNA, 30 bp, Artificial Sequence
  Synthetic
ctttgcattttctaccatctttttcgtaaa

SEQ ID NO: 1790 - DNA, 30 bp, Artificial Sequence
  Synthetic
tctttgcattttctaccatctttttcgtaa

SEQ ID NO: 1791 - DNA, 30 bp, Artificial Sequence
  Synthetic
ttctttgcattttctaccatctttttcgta

SEQ ID NO: 1792 - DNA, 30 bp, Artificial Sequence
  Synthetic
tttctttgcattttctaccatctttttcgt

SEQ ID NO: 1793 - DNA, 30 bp, Artificial Sequence
  Synthetic
ttttctttgcattttctaccatctttttcg

SEQ ID NO: 1794 - DNA, 30 bp, Artificial Sequence
  Synthetic
attttctttgcattttctaccatctttttc

SEQ ID NO: 1795 - DNA, 30 bp, Artificial Sequence
  Synthetic
aattttctttgcattttctaccatcttttt

SEQ ID NO: 1796 - DNA, 30 bp, Artificial Sequence
  Synthetic
caattttctttgcattttctaccatctttt

SEQ ID NO: 1797 - DNA, 30 bp, Artificial Sequence
  Synthetic
atccccgggtaccgagctcgaattcactgg

SEQ ID NO: 1798 - DNA, 30 bp, Artificial Sequence
  Synthetic
gatccccgggtaccgagctcgaattcactg

SEQ ID NO: 1799 - DNA, 30 bp, Artificial Sequence
  Synthetic
ggatccccgggtaccgagctcgaattcact

SEQ ID NO: 1800 - DNA, 30 bp, Artificial Sequence
  Synthetic
agaggatccccgggtaccgagctcgaattc

SEQ ID NO: 1801 - DNA, 30 bp, Artificial Sequence
  Synthetic
ctagaggatccccgggtaccgagctcgaat

SEQ ID NO: 1802 - DNA, 30 bp, Artificial Sequence
  Synthetic
tttctagaggatccccgggtaccgagctcg

SEQ ID NO: 1803 - DNA, 30 bp, Artificial Sequence
  Synthetic
atttctagaggatccccgggtaccgagctc

SEQ ID NO: 1804 - DNA, 30 bp, Artificial Sequence
  Synthetic
atatttctagaggatccccgggtaccgagc

SEQ ID NO: 1805 - DNA, 30 bp, Artificial Sequence
  Synthetic
catatttctagaggatccccgggtaccgag

SEQ ID NO: 1806 - DNA, 30 bp, Artificial Sequence
  Synthetic
atccatatttctagaggatccccgggtacc

SEQ ID NO: 1807 - DNA, 30 bp, Artificial Sequence
  Synthetic
aatccatatttctagaggatccccgggtac

SEQ ID NO: 1808 - DNA, 30 bp, Artificial Sequence
  Synthetic
taatccatatttctagaggatccccgggta

SEQ ID NO: 1809 - DNA, 30 bp, Artificial Sequence
  Synthetic
agtaatccatatttctagaggatccccggg

SEQ ID NO: 1810 - DNA, 30 bp, Artificial Sequence
  Synthetic
aagtaatccatatttctagaggatccccgg

SEQ ID NO: 1811 - DNA, 30 bp, Artificial Sequence
  Synthetic
tctaccaagtaatccatatttctagaggat

SEQ ID NO: 1812 - DNA, 30 bp, Artificial Sequence
  Synthetic
gttctaccaagtaatccatatttctagagg

SEQ ID NO: 1813 - DNA, 30 bp, Artificial Sequence
  Synthetic
ctgttctaccaagtaatccatatttctaga

SEQ ID NO: 1814 - DNA, 30 bp, Artificial Sequence
  Synthetic
ttgctgttctaccaagtaatccatatttct

SEQ ID NO: 1815 - DNA, 30 bp, Artificial Sequence
  Synthetic
gattgctgttctaccaagtaatccatattt

SEQ ID NO: 1816 - DNA, 30 bp, Artificial Sequence
  Synthetic
agattgctgttctaccaagtaatccatatt

SEQ ID NO: 1817 - DNA, 30 bp, Artificial Sequence
  Synthetic
agtagattgctgttctaccaagtaatccat

SEQ ID NO: 1818 - DNA, 30 bp, Artificial Sequence
  Synthetic
gagtagattgctgttctaccaagtaatcca

SEQ ID NO: 1819 - DNA, 30 bp, Artificial Sequence
  Synthetic
cgagtagattgctgttctaccaagtaatcc

SEQ ID NO: 1820 - DNA, 30 bp, Artificial Sequence
  Synthetic
tcgagtagattgctgttctaccaagtaatc

SEQ ID NO: 1821 - DNA, 30 bp, Artificial Sequence
  Synthetic
ggtcgagtagattgctgttctaccaagtaa

SEQ ID NO: 1822 - DNA, 30 bp, Artificial Sequence
  Synthetic
aggtcgagtagattgctgttctaccaagta

SEQ ID NO: 1823 - DNA, 30 bp, Artificial Sequence
  Synthetic
gcaggtcgagtagattgctgttctaccaag

SEQ ID NO: 1824 - DNA, 30 bp, Artificial Sequence
  Synthetic
tgcaggtcgagtagattgctgttctaccaa

SEQ ID NO: 1825 - DNA, 30 bp, Artificial Sequence
  Synthetic
ctgcaggtcgagtagattgctgttctacca

SEQ ID NO: 1826 - DNA, 30 bp, Artificial Sequence
  Synthetic
cctgcaggtcgagtagattgctgttctacc

SEQ ID NO: 1827 - DNA, 30 bp, Artificial Sequence
  Synthetic
gcctgcaggtcgagtagattgctgttctac

SEQ ID NO: 1828 - DNA, 30 bp, Artificial Sequence
  Synthetic
tgcctgcaggtcgagtagattgctgttcta

SEQ ID NO: 1829 - DNA, 30 bp, Artificial Sequence
  Synthetic
catgcctgcaggtcgagtagattgctgttc

SEQ ID NO: 1830 - DNA, 30 bp, Artificial Sequence
  Synthetic
gcatgcctgcaggtcgagtagattgctgtt

SEQ ID NO: 1831 - DNA, 30 bp, Artificial Sequence
  Synthetic
tgcatgcctgcaggtcgagtagattgctgt

SEQ ID NO: 1832 - DNA, 30 bp, Artificial Sequence
  Synthetic
cttgcatgcctgcaggtcgagtagattgct

SEQ ID NO: 1833 - DNA, 30 bp, Artificial Sequence
  Synthetic
gcttgcatgcctgcaggtcgagtagattgc

SEQ ID NO: 1834 - DNA, 30 bp, Artificial Sequence
  Synthetic
agcttgcatgcctgcaggtcgagtagattg

SEQ ID NO: 1835 - DNA, 30 bp, Artificial Sequence
  Synthetic
aagcttgcatgcctgcaggtcgagtagatt

SEQ ID NO: 1836 - DNA, 30 bp, Artificial Sequence
  Synthetic
caagcttgcatgcctgcaggtcgagtagat

SEQ ID NO: 1837 - DNA, 30 bp, Artificial Sequence
  Synthetic
ccaagcttgcatgcctgcaggtcgagtaga

SEQ ID NO: 1838 - DNA, 30 bp, Artificial Sequence
  Synthetic
gccaagcttgcatgcctgcaggtcgagtag

SEQ ID NO: 1839 - DNA, 30 bp, Artificial Sequence
  Synthetic
cgccaagcttgcatgcctgcaggtcgagta

SEQ ID NO: 1840 - DNA, 30 bp, Artificial Sequence
  Synthetic
tacgccaagcttgcatgcctgcaggtcgag

SEQ ID NO: 1841 - DNA, 30 bp, Artificial Sequence
  Synthetic
ttacgccaagcttgcatgcctgcaggtcga

SEQ ID NO: 1842 - DNA, 30 bp, Artificial Sequence
  Synthetic
attacgccaagcttgcatgcctgcaggtcg

SEQ ID NO: 1843 - DNA, 30 bp, Artificial Sequence
  Synthetic
gattacgccaagcttgcatgcctgcaggtc

SEQ ID NO: 1844 - DNA, 30 bp, Artificial Sequence
  Synthetic
tgattacgccaagcttgcatgcctgcaggt

SEQ ID NO: 1845 - DNA, 30 bp, Artificial Sequence
  Synthetic
atgattacgccaagcttgcatgcctgcagg

SEQ ID NO: 1846 - DNA, 30 bp, Artificial Sequence
  Synthetic
catgattacgccaagcttgcatgcctgcag

SEQ ID NO: 1847 - DNA, 30 bp, Artificial Sequence
  Synthetic
accatgattacgccaagcttgcatgcctgc

SEQ ID NO: 1848 - DNA, 30 bp, Artificial Sequence
  Synthetic
gaccatgattacgccaagcttgcatgcctg

SEQ ID NO: 1849 - DNA, 30 bp, Artificial Sequence
  Synthetic
tgaccatgattacgccaagcttgcatgcct

SEQ ID NO: 1850 - DNA, 30 bp, Artificial Sequence
  Synthetic
atgaccatgattacgccaagcttgcatgcc

SEQ ID NO: 1851 - DNA, 30 bp, Artificial Sequence
  Synthetic
ctatgaccatgattacgccaagcttgcatg

SEQ ID NO: 1852 - DNA, 30 bp, Artificial Sequence
  Synthetic
gctatgaccatgattacgccaagcttgcat

SEQ ID NO: 1853 - DNA, 30 bp, Artificial Sequence
  Synthetic
acagctatgaccatgattacgccaagcttg

SEQ ID NO: 1854 - DNA, 30 bp, Artificial Sequence
  Synthetic
aacagctatgaccatgattacgccaagctt

SEQ ID NO: 1855 - DNA, 30 bp, Artificial Sequence
  Synthetic
aaacagctatgaccatgattacgccaagct

SEQ ID NO: 1856 - DNA, 30 bp, Artificial Sequence
  Synthetic
gaaacagctatgaccatgattacgccaagc

SEQ ID NO: 1857 - DNA, 30 bp, Artificial Sequence
  Synthetic
caggaaacagctatgaccatgattacgcca

SEQ ID NO: 1858 - DNA, 30 bp, Artificial Sequence
  Synthetic
acaggaaacagctatgaccatgattacgcc

SEQ ID NO: 1859 - DNA, 30 bp, Artificial Sequence
  Synthetic
cacaggaaacagctatgaccatgattacgc

SEQ ID NO: 1860 - DNA, 30 bp, Artificial Sequence
  Synthetic
taaacacaggaaacagctatgaccatgatt

SEQ ID NO: 1861 - DNA, 30 bp, Artificial Sequence
  Synthetic
gataaacacaggaaacagctatgaccatga

SEQ ID NO: 1862 - DNA, 30 bp, Artificial Sequence
  Synthetic
ggataaacacaggaaacagctatgaccatg

SEQ ID NO: 1863 - DNA, 30 bp, Artificial Sequence
  Synthetic
cggataaacacaggaaacagctatgaccat

SEQ ID NO: 1864 - DNA, 30 bp, Artificial Sequence
  Synthetic
gcggataaacacaggaaacagctatgacca

SEQ ID NO: 1865 - DNA, 30 bp, Artificial Sequence
  Synthetic
agcggataaacacaggaaacagctatgacc

SEQ ID NO: 1866 - DNA, 30 bp, Artificial Sequence
  Synthetic
gagcggataaacacaggaaacagctatgac

SEQ ID NO: 1867 - DNA, 30 bp, Artificial Sequence
  Synthetic
tgagcggataaacacaggaaacagctatga

SEQ ID NO: 1868 - DNA, 30 bp, Artificial Sequence
  Synthetic
tgtgagcggataaacacaggaaacagctat

SEQ ID NO: 1869 - DNA, 30 bp, Artificial Sequence
  Synthetic
attgtgagcggataaacacaggaaacagct

SEQ ID NO: 1870 - DNA, 30 bp, Artificial Sequence
  Synthetic
aattgtgagcggataaacacaggaaacagc

SEQ ID NO: 1871 - DNA, 30 bp, Artificial Sequence
  Synthetic
gaattgtgagcggataaacacaggaaacag

SEQ ID NO: 1872 - DNA, 30 bp, Artificial Sequence
  Synthetic
gtggaattgtgagcggataaacacaggaaa

SEQ ID NO: 1873 - DNA, 30 bp, Artificial Sequence
  Synthetic
tgtggaattgtgagcggataaacacaggaa

SEQ ID NO: 1874 - DNA, 30 bp, Artificial Sequence
  Synthetic
gtgtggaattgtgagcggataaacacagga

SEQ ID NO: 1875 - DNA, 30 bp, Artificial Sequence
  Synthetic
tgtgtggaattgtgagcggataaacacagg

SEQ ID NO: 1876 - DNA, 30 bp, Artificial Sequence
  Synthetic
gttgtgtggaattgtgagcggataaacaca

SEQ ID NO: 1877 - DNA, 30 bp, Artificial Sequence
  Synthetic
tgttgtgtggaattgtgagcggataaacac

SEQ ID NO: 1878 - DNA, 30 bp, Artificial Sequence
  Synthetic
atgttgtgtggaattgtgagcggataaaca

SEQ ID NO: 1879 - DNA, 30 bp, Artificial Sequence
  Synthetic
gtatgttgtgtggaattgtgagcggataaa

SEQ ID NO: 1880 - DNA, 30 bp, Artificial Sequence
  Synthetic
cgtatgttgtgtggaattgtgagcggataa

SEQ ID NO: 1881 - DNA, 30 bp, Artificial Sequence
  Synthetic
tcgtatgttgtgtggaattgtgagcggata

SEQ ID NO: 1882 - DNA, 30 bp, Artificial Sequence
  Synthetic
gctcgtatgttgtgtggaattgtgagcgga

SEQ ID NO: 1883 - DNA, 30 bp, Artificial Sequence
  Synthetic
ggctcgtatgttgtgtggaattgtgagcgg

SEQ ID NO: 1884 - DNA, 30 bp, Artificial Sequence
  Synthetic
ccggctcgtatgttgtgtggaattgtgagc

SEQ ID NO: 1885 - DNA, 30 bp, Artificial Sequence
  Synthetic
tccggctcgtatgttgtgtggaattgtgag

SEQ ID NO: 1886 - DNA, 30 bp, Artificial Sequence
  Synthetic
ttccggctcgtatgttgtgtggaattgtga

SEQ ID NO: 1887 - DNA, 30 bp, Artificial Sequence
  Synthetic
gcttccggctcgtatgttgtgtggaattgt

SEQ ID NO: 1888 - DNA, 30 bp, Artificial Sequence
  Synthetic
tgcttccggctcgtatgttgtgtggaattg

SEQ ID NO: 1889 - DNA, 30 bp, Artificial Sequence
  Synthetic
atgcttccggctcgtatgttgtgtggaatt

SEQ ID NO: 1890 - DNA, 30 bp, Artificial Sequence
  Synthetic
ttatgcttccggctcgtatgttgtgtggaa

SEQ ID NO: 1891 - DNA, 30 bp, Artificial Sequence
  Synthetic
tttatgcttccggctcgtatgttgtgtgga

SEQ ID NO: 1892 - DNA, 30 bp, Artificial Sequence
  Synthetic
aactgtgaaagacaactcttcactgcgaat

SEQ ID NO: 1893 - DNA, 30 bp, Artificial Sequence
  Synthetic
caactgtgaaagacaactcttcactgcgaa

SEQ ID NO: 1894 - DNA, 30 bp, Artificial Sequence
  Synthetic
acaactgtgaaagacaactcttcactgcga

SEQ ID NO: 1895 - DNA, 30 bp, Artificial Sequence
  Synthetic
atacaactgtgaaagacaactcttcactgc

SEQ ID NO: 1896 - DNA, 30 bp, Artificial Sequence
  Synthetic
gatacaactgtgaaagacaactcttcactg

SEQ ID NO: 1897 - DNA, 30 bp, Artificial Sequence
  Synthetic
ttgatacaactgtgaaagacaactcttcac

SEQ ID NO: 1898 - DNA, 30 bp, Artificial Sequence
  Synthetic
tttgatacaactgtgaaagacaactcttca

SEQ ID NO: 1899 - DNA, 30 bp, Artificial Sequence
  Synthetic
cgtttgatacaactgtgaaagacaactctt

SEQ ID NO: 1900 - DNA, 30 bp, Artificial Sequence
  Synthetic
ccgtttgatacaactgtgaaagacaactct

SEQ ID NO: 1901 - DNA, 30 bp, Artificial Sequence
  Synthetic
ctccgtttgatacaactgtgaaagacaact

SEQ ID NO: 1902 - DNA, 30 bp, Artificial Sequence
  Synthetic
gctccgtttgatacaactgtgaaagacaac

SEQ ID NO: 1903 - DNA, 30 bp, Artificial Sequence
  Synthetic
tggctccgtttgatacaactgtgaaagaca

SEQ ID NO: 1904 - DNA, 30 bp, Artificial Sequence
  Synthetic
ttggctccgtttgatacaactgtgaaagac

SEQ ID NO: 1905 - DNA, 30 bp, Artificial Sequence
  Synthetic
tttggctccgtttgatacaactgtgaaaga

SEQ ID NO: 1906 - DNA, 30 bp, Artificial Sequence
  Synthetic
tttttggctccgtttgatacaactgtgaaa

SEQ ID NO: 1907 - DNA, 30 bp, Artificial Sequence
  Synthetic
gatgtttttggctccgtttgatacaactgt

SEQ ID NO: 1908 - DNA, 30 bp, Artificial Sequence
  Synthetic
tgatgtttttggctccgtttgatacaactg

SEQ ID NO: 1909 - DNA, 30 bp, Artificial Sequence
  Synthetic
ctgatgtttttggctccgtttgatacaact

SEQ ID NO: 1910 - DNA, 30 bp, Artificial Sequence
  Synthetic
actgatgtttttggctccgtttgatacaac

SEQ ID NO: 1911 - DNA, 30 bp, Artificial Sequence
  Synthetic
gaccactgatgtttttggctccgtttgata

SEQ ID NO: 1912 - DNA, 30 bp, Artificial Sequence
  Synthetic
tgaccactgatgtttttggctccgtttgat

SEQ ID NO: 1913 - DNA, 30 bp, Artificial Sequence
  Synthetic
ctgaccactgatgtttttggctccgtttga

SEQ ID NO: 1914 - DNA, 30 bp, Artificial Sequence
  Synthetic
ctctgaccactgatgtttttggctccgttt

SEQ ID NO: 1915 - DNA, 30 bp, Artificial Sequence
  Synthetic
actctgaccactgatgtttttggctccgtt

SEQ ID NO: 1916 - DNA, 30 bp, Artificial Sequence
  Synthetic
gactctgaccactgatgtttttggctccgt

SEQ ID NO: 1917 - DNA, 30 bp, Artificial Sequence
  Synthetic
cggactctgaccactgatgtttttggctcc

SEQ ID NO: 1918 - DNA, 30 bp, Artificial Sequence
  Synthetic
gccggactctgaccactgatgtttttggct

SEQ ID NO: 1919 - DNA, 30 bp, Artificial Sequence
  Synthetic
cgccggactctgaccactgatgtttttggc

SEQ ID NO: 1920 - DNA, 30 bp, Artificial Sequence
  Synthetic
gcgccggactctgaccactgatgtttttgg

SEQ ID NO: 1921 - DNA, 30 bp, Artificial Sequence
  Synthetic
cgcgccggactctgaccactgatgtttttg

SEQ ID NO: 1922 - DNA, 30 bp, Artificial Sequence
  Synthetic
ttcgcgccggactctgaccactgatgtttt

SEQ ID NO: 1923 - DNA, 30 bp, Artificial Sequence
  Synthetic
agttcgcgccggactctgaccactgatgtt

SEQ ID NO: 1924 - DNA, 30 bp, Artificial Sequence
  Synthetic
aagttcgcgccggactctgaccactgatgt

SEQ ID NO: 1925 - DNA, 30 bp, Artificial Sequence
  Synthetic
gaagttcgcgccggactctgaccactgatg

SEQ ID NO: 1926 - DNA, 30 bp, Artificial Sequence
  Synthetic
agaagttcgcgccggactctgaccactgat

SEQ ID NO: 1927 - DNA, 30 bp, Artificial Sequence
  Synthetic
gaagaagttcgcgccggactctgaccactg

SEQ ID NO: 1928 - DNA, 30 bp, Artificial Sequence
  Synthetic
ggaagaagttcgcgccggactctgaccact

SEQ ID NO: 1929 - DNA, 30 bp, Artificial Sequence
  Synthetic
tcggaagaagttcgcgccggactctgacca

SEQ ID NO: 1930 - DNA, 30 bp, Artificial Sequence
  Synthetic
gtcggaagaagttcgcgccggactctgacc

SEQ ID NO: 1931 - DNA, 30 bp, Artificial Sequence
  Synthetic
ggtcggaagaagttcgcgccggactctgac

SEQ ID NO: 1932 - DNA, 30 bp, Artificial Sequence
  Synthetic
gggtcggaagaagttcgcgccggactctga

SEQ ID NO: 1933 - DNA, 30 bp, Artificial Sequence
  Synthetic
tgggtcggaagaagttcgcgccggactctg

SEQ ID NO: 1934 - DNA, 30 bp, Artificial Sequence
  Synthetic
ccctgggtcggaagaagttcgcgccggact

SEQ ID NO: 1935 - DNA, 30 bp, Artificial Sequence
  Synthetic
tccctgggtcggaagaagttcgcgccggac

SEQ ID NO: 1936 - DNA, 30 bp, Artificial Sequence
  Synthetic
gtccctgggtcggaagaagttcgcgccgga

SEQ ID NO: 1937 - DNA, 30 bp, Artificial Sequence
  Synthetic
ggtccctgggtcggaagaagttcgcgccgg

SEQ ID NO: 1938 - DNA, 30 bp, Artificial Sequence
  Synthetic
tggtccctgggtcggaagaagttcgcgccg

SEQ ID NO: 1939 - DNA, 30 bp, Artificial Sequence
  Synthetic
ttggtccctgggtcggaagaagttcgcgcc

SEQ ID NO: 1940 - DNA, 30 bp, Artificial Sequence
  Synthetic
gtgttggtccctgggtcggaagaagttcgc

SEQ ID NO: 1941 - DNA, 30 bp, Artificial Sequence
  Synthetic
tgtgttggtccctgggtcggaagaagttcg

SEQ ID NO: 1942 - DNA, 30 bp, Artificial Sequence
  Synthetic
ttgtgttggtccctgggtcggaagaagttc

SEQ ID NO: 1943 - DNA, 30 bp, Artificial Sequence
  Synthetic
tgttgtgttggtccctgggtcggaagaagt

SEQ ID NO: 1944 - DNA, 30 bp, Artificial Sequence
  Synthetic
ttgttgtgttggtccctgggtcggaagaag

SEQ ID NO: 1945 - DNA, 30 bp, Artificial Sequence
  Synthetic
gttgttgtgttggtccctgggtcggaagaa

SEQ ID NO: 1946 - DNA, 30 bp, Artificial Sequence
  Synthetic
tcagttgttgtgttggtccctgggtcggaa

SEQ ID NO: 1947 - DNA, 30 bp, Artificial Sequence
  Synthetic
ttcagttgttgtgttggtccctgggtcgga

SEQ ID NO: 1948 - DNA, 30 bp, Artificial Sequence
  Synthetic
cttcagttgttgtgttggtccctgggtcgg

SEQ ID NO: 1949 - DNA, 30 bp, Artificial Sequence
  Synthetic
tcttcagttgttgtgttggtccctgggtcg

SEQ ID NO: 1950 - DNA, 30 bp, Artificial Sequence
  Synthetic
gtcttcagttgttgtgttggtccctgggtc

SEQ ID NO: 1951 - DNA, 30 bp, Artificial Sequence
  Synthetic
ggtcttcagttgttgtgttggtccctgggt

SEQ ID NO: 1952 - DNA, 30 bp, Artificial Sequence
  Synthetic
tgtggtcttcagttgttgtgttggtccctg

SEQ ID NO: 1953 - DNA, 30 bp, Artificial Sequence
  Synthetic
ttgtggtcttcagttgttgtgttggtccct

SEQ ID NO: 1954 - DNA, 30 bp, Artificial Sequence
  Synthetic
tttgtggtcttcagttgttgtgttggtccc

SEQ ID NO: 1955 - DNA, 30 bp, Artificial Sequence
  Synthetic
ttttgtggtcttcagttgttgtgttggtcc

SEQ ID NO: 1956 - DNA, 30 bp, Artificial Sequence
  Synthetic
gattttgtggtcttcagttgttgtgttggt

SEQ ID NO: 1957 - DNA, 30 bp, Artificial Sequence
  Synthetic
tgattttgtggtcttcagttgttgtgttgg

SEQ ID NO: 1958 - DNA, 30 bp, Artificial Sequence
  Synthetic
atgattttgtggtcttcagttgttgtgttg

SEQ ID NO: 1959 - DNA, 30 bp, Artificial Sequence
  Synthetic
ccatgattttgtggtcttcagttgttgtgt

SEQ ID NO: 1960 - DNA, 30 bp, Artificial Sequence
  Synthetic
agccatgattttgtggtcttcagttgttgt

SEQ ID NO: 1961 - DNA, 30 bp, Artificial Sequence
  Synthetic
aagccatgattttgtggtcttcagttgttg

SEQ ID NO: 1962 - DNA, 30 bp, Artificial Sequence
  Synthetic
gaagccatgattttgtggtcttcagttgtt

SEQ ID NO: 1963 - DNA, 30 bp, Artificial Sequence
  Synthetic
tgaagccatgattttgtggtcttcagttgt

SEQ ID NO: 1964 - DNA, 30 bp, Artificial Sequence
  Synthetic
ttctgaagccatgattttgtggtcttcagt

SEQ ID NO: 1965 - DNA, 30 bp, Artificial Sequence
  Synthetic
tttctgaagccatgattttgtggtcttcag

SEQ ID NO: 1966 - DNA, 30 bp, Artificial Sequence
  Synthetic
attttctgaagccatgattttgtggtcttc

SEQ ID NO: 1967 - DNA, 30 bp, Artificial Sequence
  Synthetic
aattttctgaagccatgattttgtggtctt

SEQ ID NO: 1968 - DNA, 30 bp, Artificial Sequence
  Synthetic
gaattttctgaagccatgattttgtggtct

SEQ ID NO: 1969 - DNA, 30 bp, Artificial Sequence
  Synthetic
aggaattttctgaagccatgattttgtggt

SEQ ID NO: 1970 - DNA, 30 bp, Artificial Sequence
  Synthetic
agaggaattttctgaagccatgattttgtg

SEQ ID NO: 1971 - DNA, 30 bp, Artificial Sequence
  Synthetic
cagaggaattttctgaagccatgattttgt

SEQ ID NO: 1972 - DNA, 30 bp, Artificial Sequence
  Synthetic
gcagaggaattttctgaagccatgattttg

SEQ ID NO: 1973 - DNA, 30 bp, Artificial Sequence
  Synthetic
tgcagaggaattttctgaagccatgatttt

SEQ ID NO: 1974 - DNA, 30 bp, Artificial Sequence
  Synthetic
cattgcagaggaattttctgaagccatgat

SEQ ID NO: 1975 - DNA, 30 bp, Artificial Sequence
  Synthetic
ccattgcagaggaattttctgaagccatga

SEQ ID NO: 1976 - DNA, 30 bp, Artificial Sequence
  Synthetic
accattgcagaggaattttctgaagccatg

SEQ ID NO: 1977 - DNA, 30 bp, Artificial Sequence
  Synthetic
aaccattgcagaggaattttctgaagccat

SEQ ID NO: 1978 - DNA, 30 bp, Artificial Sequence
  Synthetic
ttgaaccattgcagaggaattttctgaagc

SEQ ID NO: 1979 - DNA, 30 bp, Artificial Sequence
  Synthetic
acttgaaccattgcagaggaattttctgaa

SEQ ID NO: 1980 - DNA, 30 bp, Artificial Sequence
  Synthetic
cacttgaaccattgcagaggaattttctga

SEQ ID NO: 1981 - DNA, 30 bp, Artificial Sequence
  Synthetic
tgcacttgaaccattgcagaggaattttct

SEQ ID NO: 1982 - DNA, 30 bp, Artificial Sequence
  Synthetic
gtgcacttgaaccattgcagaggaattttc

SEQ ID NO: 1983 - DNA, 30 bp, Artificial Sequence
  Synthetic
ctgtgcacttgaaccattgcagaggaattt

SEQ ID NO: 1984 - DNA, 30 bp, Artificial Sequence
  Synthetic
actgtgcacttgaaccattgcagaggaatt

SEQ ID NO: 1985 - DNA, 30 bp, Artificial Sequence
  Synthetic
tgactgtgcacttgaaccattgcagaggaa

SEQ ID NO: 1986 - DNA, 30 bp, Artificial Sequence
  Synthetic
ttgactgtgcacttgaaccattgcagagga

SEQ ID NO: 1987 - DNA, 28 bp, Artificial Sequence
  Synthetic
tatcaaccaataatagtctgaatgtcat

SEQ ID NO: 1988 - DNA, 28 bp, Artificial Sequence
  Synthetic
atgtcattggttgacctttgtacattaa

SEQ ID NO: 1989 - DNA, 28 bp, Artificial Sequence
  Synthetic
ttaggatgctttgtttcaggtgtatcaa

SEQ ID NO: 1990 - DNA, 28 bp, Artificial Sequence
  Synthetic
tttctctacaccttttttaggatgcttt

SEQ ID NO: 1991 - DNA, 28 bp, Artificial Sequence
  Synthetic
tgtcattggttgacctttgtacattaat

SEQ ID NO: 1992 - DNA, 28 bp, Artificial Sequence
  Synthetic
atagtctgaatgtcattggttgaccttt

SEQ ID NO: 1993 - DNA, 28 bp, Artificial Sequence
  Synthetic
agtctgaatgtcattggttgacctttgt

SEQ ID NO: 1994 - DNA, 28 bp, Artificial Sequence
  Synthetic
tacattaatttaacagtatcaccatcaa

SEQ ID NO: 1995 - DNA, 28 bp, Artificial Sequence
  Synthetic
atgctttgtttcaggtgtatcaaccaat

SEQ ID NO: 1996 - DNA, 28 bp, Artificial Sequence
  Synthetic
aggatgctttgtttcaggtgtatcaacc

SEQ ID NO: 1997 - DNA, 28 bp, Artificial Sequence
  Synthetic
catatttctctacaccttttttaggatg

SEQ ID NO: 1998 - DNA, 28 bp, Artificial Sequence
  Synthetic
accatatttctctacaccttttttagga

SEQ ID NO: 1999 - DNA, 28 bp, Artificial Sequence
  Synthetic
cttttttaggatgctttgtttcaggtgt

SEQ ID NO: 2000 - DNA, 28 bp, Artificial Sequence
  Synthetic
tacaccttttttaggatgctttgtttca

SEQ ID NO: 2001 - DNA, 28 bp, Artificial Sequence
  Synthetic
tctttttcgtaaatgcacttgcttcagg

SEQ ID NO: 2002 - DNA, 28 bp, Artificial Sequence
  Synthetic
ttttctttgcattttctaccatcttttt

SEQ ID NO: 2003 - DNA, 28 bp, Artificial Sequence
  Synthetic
tgaatgtcattggttgacctttgtacat

SEQ ID NO: 2004 - DNA, 28 bp, Artificial Sequence
  Synthetic
ttttttaggatgctttgtttcaggtgta

SEQ ID NO: 2005 - DNA, 28 bp, Artificial Sequence
  Synthetic
tttgtttcaggtgtatcaaccaataata

SEQ ID NO: 2006 - DNA, 28 bp, Artificial Sequence
  Synthetic
ttgcttcaggaccatatttctctacacc

SEQ ID NO: 2007 - DNA, 28 bp, Artificial Sequence
  Synthetic
tcaggtgtatcaaccaataatagtctga

SEQ ID NO: 2008 - DNA, 28 bp, Artificial Sequence
  Synthetic
acttgcttcaggaccatatttctctaca

SEQ ID NO: 2009 - DNA, 28 bp, Artificial Sequence
  Synthetic
tttgtttcaggtgtatcaaccaataata

SEQ ID NO: 2010 - DNA, 28 bp, Artificial Sequence
  Synthetic
tctacaccttttttaggatgctttgttt

SEQ ID NO: 2011 - DNA, 28 bp, Artificial Sequence
  Synthetic
cttcaggaccatatttctctacaccttt

SEQ ID NO: 2012 - DNA, 28 bp, Artificial Sequence
  Synthetic
tgacctttgtacattaatttaacagtat

SEQ ID NO: 2013 - DNA, 28 bp, Artificial Sequence
  Synthetic
attggttgacctttgtacattaatttaa

SEQ ID NO: 2014 - DNA, 28 bp, Artificial Sequence
  Synthetic
gtcattggttgacctttgtacattaatt

SEQ ID NO: 2015 - DNA, 28 bp, Artificial Sequence
  Synthetic
ttctctacaccttttttaggatgctttg

SEQ ID NO: 2016 - DNA, 28 bp, Artificial Sequence
  Synthetic
gcattttctaccatctttttcgtaaatg

SEQ ID NO: 2017 - DNA, 28 bp, Artificial Sequence
  Synthetic
gcgccactggccacgtggttgctgttgg

SEQ ID NO: 2018 - DNA, 28 bp, Artificial Sequence
  Synthetic
tggctgcctccccggcgccactggccac

SEQ ID NO: 2019 - DNA, 28 bp, Artificial Sequence
  Synthetic
ctgcctccccggcgccactggccacgtg

SEQ ID NO: 2020 - DNA, 28 bp, Artificial Sequence
  Synthetic
ggctgcctccccggcgccactggccacg

SEQ ID NO: 2021 - DNA, 28 bp, Artificial Sequence
  Synthetic
ccccggcgccactggccacgtggttgct

SEQ ID NO: 2022 - DNA, 28 bp, Artificial Sequence
  Synthetic
gctgcctccccggcgccactggccacgt

SEQ ID NO: 2023 - DNA, 28 bp, Artificial Sequence
  Synthetic
cgccactggccacgtggttgctgttggg

SEQ ID NO: 2024 - DNA, 28 bp, Artificial Sequence
  Synthetic
cggcgccactggccacgtggttgctgtt

SEQ ID NO: 2025 - DNA, 28 bp, Artificial Sequence
  Synthetic
atggctgcctccccggcgccactggcca

SEQ ID NO: 2026 - DNA, 28 bp, Artificial Sequence
  Synthetic
cccggcgccactggccacgtggttgctg

SEQ ID NO: 2027 - DNA, 28 bp, Artificial Sequence
  Synthetic
aatggctgcctccccggcgccactggcc

SEQ ID NO: 2028 - DNA, 28 bp, Artificial Sequence
  Synthetic
ctccccggcgccactggccacgtggttg

SEQ ID NO: 2029 - DNA, 28 bp, Artificial Sequence
  Synthetic
cctccccggcgccactggccacgtggtt

SEQ ID NO: 2030 - DNA, 28 bp, Artificial Sequence
  Synthetic
tcaatggctgcctccccggcgccactgg

SEQ ID NO: 2031 - DNA, 28 bp, Artificial Sequence
  Synthetic
ccggcgccactggccacgtggttgctgt

SEQ ID NO: 2032 - DNA, 28 bp, Artificial Sequence
  Synthetic
caatggctgcctccccggcgccactggc

SEQ ID NO: 2033 - DNA, 28 bp, Artificial Sequence
  Synthetic
tgcctccccggcgccactggccacgtgg

SEQ ID NO: 2034 - DNA, 28 bp, Artificial Sequence
  Synthetic
tccccggcgccactggccacgtggttgc

SEQ ID NO: 2035 - DNA, 28 bp, Artificial Sequence
  Synthetic
ggcgccactggccacgtggttgctgttg

SEQ ID NO: 2036 - DNA, 28 bp, Artificial Sequence
  Synthetic
gcctccccggcgccactggccacgtggt

SEQ ID NO: 2037 - DNA, 28 bp, Artificial Sequence
  Synthetic
tctcaatggctttcccctgggtgatgca

SEQ ID NO: 2038 - DNA, 28 bp, Artificial Sequence
  Synthetic
atggctttcccctgggtgatgcaagagc

SEQ ID NO: 2039 - DNA, 28 bp, Artificial Sequence
  Synthetic
aatggctttcccctgggtgatgcaagag

SEQ ID NO: 2040 - DNA, 28 bp, Artificial Sequence
  Synthetic
gggtgatgcaagagctgaggtcctgcag

SEQ ID NO: 2041 - DNA, 28 bp, Artificial Sequence
  Synthetic
tggctttcccctgggtgatgcaagagct

SEQ ID NO: 2042 - DNA, 28 bp, Artificial Sequence
  Synthetic
ctcaatggctttcccctgggtgatgcaa

SEQ ID NO: 2043 - DNA, 28 bp, Artificial Sequence
  Synthetic
ttcccctgggtgatgcaagagctgaggt

SEQ ID NO: 2044 - DNA, 28 bp, Artificial Sequence
  Synthetic
gctttcccctgggtgatgcaagagctga

SEQ ID NO: 2045 - DNA, 28 bp, Artificial Sequence
  Synthetic
tcccctgggtgatgcaagagctgaggtc

SEQ ID NO: 2046 - DNA, 28 bp, Artificial Sequence
  Synthetic
ctttcccctgggtgatgcaagagctgag

SEQ ID NO: 2047 - DNA, 28 bp, Artificial Sequence
  Synthetic
caatggctttcccctgggtgatgcaaga

SEQ ID NO: 2048 - DNA, 28 bp, Artificial Sequence
  Synthetic
cctgggtgatgcaagagctgaggtcctg

SEQ ID NO: 2049 - DNA, 28 bp, Artificial Sequence
  Synthetic
ggtctcaatggctttcccctgggtgatg

SEQ ID NO: 2050 - DNA, 28 bp, Artificial Sequence
  Synthetic
gggtctcaatggctttcccctgggtgat

SEQ ID NO: 2051 - DNA, 28 bp, Artificial Sequence
  Synthetic
ggctttcccctgggtgatgcaagagctg

SEQ ID NO: 2052 - DNA, 28 bp, Artificial Sequence
  Synthetic
tttcccctgggtgatgcaagagctgagg

SEQ ID NO: 2053 - DNA, 28 bp, Artificial Sequence
  Synthetic
cccctgggtgatgcaagagctgaggtcc

SEQ ID NO: 2054 - DNA, 28 bp, Artificial Sequence
  Synthetic
tgggtgatgcaagagctgaggtcctgca

SEQ ID NO: 2055 - DNA, 28 bp, Artificial Sequence
  Synthetic
gtctcaatggctttcccctgggtgatgc

SEQ ID NO: 2056 - DNA, 28 bp, Artificial Sequence
  Synthetic
ctgggtgatgcaagagctgaggtcctgc

SEQ ID NO: 2057 - DNA, 28 bp, Artificial Sequence
  Synthetic
ccctgggtgatgcaagagctgaggtcct

SEQ ID NO: 2058 - DNA, 28 bp, Artificial Sequence
  Synthetic
tcaatggctttcccctgggtgatgcaag

SEQ ID NO: 2059 - DNA, 28 bp, Artificial Sequence
  Synthetic
tgggtctcaatggctttcccctgggtga

SEQ ID NO: 2060 - DNA, 30 bp, Artificial Sequence
  Synthetic
cggcgccactggccacgtggttgctgttgg

SEQ ID NO: 2061 - DNA, 30 bp, Artificial Sequence
  Synthetic
ccggcgccactggccacgtggttgctgttg

SEQ ID NO: 2062 - DNA, 30 bp, Artificial Sequence
  Synthetic
cccggcgccactggccacgtggttgctgtt

SEQ ID NO: 2063 - DNA, 30 bp, Artificial Sequence
  Synthetic
ccccggcgccactggccacgtggttgctgt

SEQ ID NO: 2064 - DNA, 30 bp, Artificial Sequence
  Synthetic
tccccggcgccactggccacgtggttgctg

SEQ ID NO: 2065 - DNA, 30 bp, Artificial Sequence
  Synthetic
ctccccggcgccactggccacgtggttgct

SEQ ID NO: 2066 - DNA, 30 bp, Artificial Sequence
  Synthetic
cctccccggcgccactggccacgtggttgc

SEQ ID NO: 2067 - DNA, 30 bp, Artificial Sequence
  Synthetic
gcctccccggcgccactggccacgtggttg

SEQ ID NO: 2068 - DNA, 30 bp, Artificial Sequence
  Synthetic
tgcctccccggcgccactggccacgtggtt

SEQ ID NO: 2069 - DNA, 30 bp, Artificial Sequence
  Synthetic
ctgcctccccggcgccactggccacgtggt

SEQ ID NO: 2070 - DNA, 30 bp, Artificial Sequence
  Synthetic
gctgcctccccggcgccactggccacgtgg

SEQ ID NO: 2071 - DNA, 30 bp, Artificial Sequence
  Synthetic
ggctgcctccccggcgccactggccacgtg

SEQ ID NO: 2072 - DNA, 30 bp, Artificial Sequence
  Synthetic
tggctgcctccccggcgccactggccacgt

SEQ ID NO: 2073 - DNA, 30 bp, Artificial Sequence
  Synthetic
atggctgcctccccggcgccactggccacg

SEQ ID NO: 2074 - DNA, 30 bp, Artificial Sequence
  Synthetic
aatggctgcctccccggcgccactggccac

SEQ ID NO: 2075 - DNA, 30 bp, Artificial Sequence
  Synthetic
caatggctgcctccccggcgccactggcca

SEQ ID NO: 2076 - DNA, 30 bp, Artificial Sequence
  Synthetic
ctgggtgatgcaagagctgaggtcctgcag

SEQ ID NO: 2077 - DNA, 30 bp, Artificial Sequence
  Synthetic
cctgggtgatgcaagagctgaggtcctgca

SEQ ID NO: 2078 - DNA, 30 bp, Artificial Sequence
  Synthetic
ccctgggtgatgcaagagctgaggtcctgc

SEQ ID NO: 2079 - DNA, 30 bp, Artificial Sequence
  Synthetic
cccctgggtgatgcaagagctgaggtcctg

SEQ ID NO: 2080 - DNA, 30 bp, Artificial Sequence
  Synthetic
tcccctgggtgatgcaagagctgaggtcct

SEQ ID NO: 2081 - DNA, 30 bp, Artificial Sequence
  Synthetic
ttcccctgggtgatgcaagagctgaggtcc

SEQ ID NO: 2082 - DNA, 30 bp, Artificial Sequence
  Synthetic
tttcccctgggtgatgcaagagctgaggtc

SEQ ID NO: 2083 - DNA, 30 bp, Artificial Sequence
  Synthetic
ctttcccctgggtgatgcaagagctgaggt

SEQ ID NO: 2084 - DNA, 30 bp, Artificial Sequence
  Synthetic
gctttcccctgggtgatgcaagagctgagg

SEQ ID NO: 2085 - DNA, 30 bp, Artificial Sequence
  Synthetic
ggctttcccctgggtgatgcaagagctgag

SEQ ID NO: 2086 - DNA, 30 bp, Artificial Sequence
  Synthetic
tggctttcccctgggtgatgcaagagctga

SEQ ID NO: 2087 - DNA, 30 bp, Artificial Sequence
  Synthetic
atggctttcccctgggtgatgcaagagctg

SEQ ID NO: 2088 - DNA, 30 bp, Artificial Sequence
  Synthetic
aatggctttcccctgggtgatgcaagagct

SEQ ID NO: 2089 - DNA, 30 bp, Artificial Sequence
  Synthetic
caatggctttcccctgggtgatgcaagagc

SEQ ID NO: 2090 - DNA, 30 bp, Artificial Sequence
  Synthetic
tcaatggctttcccctgggtgatgcaagag

SEQ ID NO: 2091 - DNA, 30 bp, Artificial Sequence
  Synthetic
ctcaatggctttcccctgggtgatgcaaga

SEQ ID NO: 2092 - DNA, 30 bp, Artificial Sequence
  Synthetic
tctcaatggctttcccctgggtgatgcaag

SEQ ID NO: 2093 - DNA, 30 bp, Artificial Sequence
  Synthetic
gtctcaatggctttcccctgggtgatgcaa

SEQ ID NO: 2094 - DNA, 30 bp, Artificial Sequence
  Synthetic
ggtctcaatggctttcccctgggtgatgca

SEQ ID NO: 2095 - DNA, 30 bp, Artificial Sequence
  Synthetic
gggtctcaatggctttcccctgggtgatgc

SEQ ID NO: 2096 - DNA, 30 bp, Artificial Sequence
  Synthetic
tgggtctcaatggctttcccctgggtgatg

SEQ ID NO: 2097 - DNA, 30 bp, Artificial Sequence
  Synthetic
ctgggtctcaatggctttcccctgggtgat

SEQ ID NO: 2098 - DNA, 30 bp, Artificial Sequence
  Synthetic
tcattggttgacctttgtacattaatttaa

SEQ ID NO: 2099 - DNA, 30 bp, Artificial Sequence
  Synthetic
tgtcattggttgacctttgtacattaattt

SEQ ID NO: 2100 - DNA, 30 bp, Artificial Sequence
  Synthetic
aatgtcattggttgacctttgtacattaat

SEQ ID NO: 2101 - DNA, 30 bp, Artificial Sequence
  Synthetic
tgaatgtcattggttgacctttgtacatta

SEQ ID NO: 2102 - DNA, 30 bp, Artificial Sequence
  Synthetic
tctgaatgtcattggttgacctttgtacat

SEQ ID NO: 2103 - DNA, 30 bp, Artificial Sequence
  Synthetic
agtctgaatgtcattggttgacctttgtac

SEQ ID NO: 2104 - DNA, 30 bp, Artificial Sequence
  Synthetic
atagtctgaatgtcattggttgacctttgt

SEQ ID NO: 2105 - DNA, 30 bp, Artificial Sequence
  Synthetic
taatagtctgaatgtcattggttgaccttt

SEQ ID NO: 2106 - DNA, 30 bp, Artificial Sequence
  Synthetic
aataatagtctgaatgtcattggttgacct

SEQ ID NO: 2107 - DNA, 30 bp, Artificial Sequence
  Synthetic
ccaataatagtctgaatgtcattggttgac

SEQ ID NO: 2108 - DNA, 30 bp, Artificial Sequence
  Synthetic
aaccaataatagtctgaatgtcattggttg

SEQ ID NO: 2109 - DNA, 30 bp, Artificial Sequence
  Synthetic
tcaaccaataatagtctgaatgtcattggt

SEQ ID NO: 2110 - DNA, 30 bp, Artificial Sequence
  Synthetic
tatcaaccaataatagtctgaatgtcattg

SEQ ID NO: 2111 - DNA, 30 bp, Artificial Sequence
  Synthetic
tgtatcaaccaataatagtctgaatgtcat

SEQ ID NO: 2112 - DNA, 30 bp, Artificial Sequence
  Synthetic
ggtgtatcaaccaataatagtctgaatgtc

SEQ ID NO: 2113 - DNA, 30 bp, Artificial Sequence
  Synthetic
caggtgtatcaaccaataatagtctgaatg

SEQ ID NO: 2114 - DNA, 30 bp, Artificial Sequence
  Synthetic
ttcaggtgtatcaaccaataatagtctgaa

SEQ ID NO: 2115 - DNA, 30 bp, Artificial Sequence
  Synthetic
gtttcaggtgtatcaaccaataatagtctg

SEQ ID NO: 2116 - DNA, 30 bp, Artificial Sequence
  Synthetic
ttgtttcaggtgtatcaaccaataatagtc

SEQ ID NO: 2117 - DNA, 30 bp, Artificial Sequence
  Synthetic
ctttgtttcaggtgtatcaaccaataatag

SEQ ID NO: 2118 - DNA, 30 bp, Artificial Sequence
  Synthetic
tgctttgtttcaggtgtatcaaccaataat

SEQ ID NO: 2119 - DNA, 30 bp, Artificial Sequence
  Synthetic
gatgctttgtttcaggtgtatcaaccaata

SEQ ID NO: 2120 - DNA, 30 bp, Artificial Sequence
  Synthetic
aggatgctttgtttcaggtgtatcaaccaa

SEQ ID NO: 2121 - DNA, 30 bp, Artificial Sequence
  Synthetic
ttaggatgctttgtttcaggtgtatcaacc

SEQ ID NO: 2122 - DNA, 30 bp, Artificial Sequence
  Synthetic
ttttaggatgctttgtttcaggtgtatcaa

SEQ ID NO: 2123 - DNA, 30 bp, Artificial Sequence
  Synthetic
ttttttaggatgctttgtttcaggtgtatc

SEQ ID NO: 2124 - DNA, 30 bp, Artificial Sequence
  Synthetic
ccttttttaggatgctttgtttcaggtgta

SEQ ID NO: 2125 - DNA, 30 bp, Artificial Sequence
  Synthetic
caccttttttaggatgctttgtttcaggtg

SEQ ID NO: 2126 - DNA, 30 bp, Artificial Sequence
  Synthetic
tacaccttttttaggatgctttgtttcagg

SEQ ID NO: 2127 - DNA, 30 bp, Artificial Sequence
  Synthetic
tctacaccttttttaggatgctttgtttca

SEQ ID NO: 2128 - DNA, 30 bp, Artificial Sequence
  Synthetic
tctctacaccttttttaggatgctttgttt

SEQ ID NO: 2129 - DNA, 30 bp, Artificial Sequence
  Synthetic
tttctctacaccttttttaggatgctttgt

SEQ ID NO: 2130 - DNA, 30 bp, Artificial Sequence
  Synthetic
tatttctctacaccttttttaggatgcttt

SEQ ID NO: 2131 - DNA, 30 bp, Artificial Sequence
  Synthetic
catatttctctacaccttttttaggatgct

SEQ ID NO: 2132 - DNA, 30 bp, Artificial Sequence
  Synthetic
accatatttctctacaccttttttaggatg

SEQ ID NO: 2133 - DNA, 30 bp, Artificial Sequence
  Synthetic
ggaccatatttctctacaccttttttagga

SEQ ID NO: 2134 - DNA, 30 bp, Artificial Sequence
  Synthetic
caggaccatatttctctacaccttttttag

SEQ ID NO: 2135 - DNA, 30 bp, Artificial Sequence
  Synthetic
ttcaggaccatatttctctacacctttttt

SEQ ID NO: 2136 - DNA, 30 bp, Artificial Sequence
  Synthetic
gcttcaggaccatatttctctacacctttt

SEQ ID NO: 2137 - DNA, 30 bp, Artificial Sequence
  Synthetic
ttgcttcaggaccatatttctctacacctt

SEQ ID NO: 2138 - DNA, 30 bp, Artificial Sequence
  Synthetic
acttgcttcaggaccatatttctctacacc

SEQ ID NO: 2139 - DNA, 30 bp, Artificial Sequence
  Synthetic
gcacttgcttcaggaccatatttctctaca

SEQ ID NO: 2140 - DNA, 30 bp, Artificial Sequence
  Synthetic
atgcacttgcttcaggaccatatttctcta

SEQ ID NO: 2141 - DNA, 30 bp, Artificial Sequence
  Synthetic
aaatgcacttgcttcaggaccatatttctc

SEQ ID NO: 2142 - DNA, 30 bp, Artificial Sequence
  Synthetic
gtaaatgcacttgcttcaggaccatatttc

SEQ ID NO: 2143 - DNA, 30 bp, Artificial Sequence
  Synthetic
tcaattttctttgcattttctaccatcttt

SEQ ID NO: 2144 - DNA, 30 bp, Artificial Sequence
  Synthetic
ttcaattttctttgcattttctaccatctt

SEQ ID NO: 2145 - DNA, 30 bp, Artificial Sequence
  Synthetic
cttcaattttctttgcattttctaccatct

SEQ ID NO: 2146 - DNA, 28 bp, Artificial Sequence
  Synthetic
tatcaaccaataatagtctgaatgtcat

SEQ ID NO: 2147 - DNA, 28 bp, Artificial Sequence
  Synthetic
ttgcttcaggaccatatttctctacacc

SEQ ID NO: 2148 - DNA, 28 bp, Artificial Sequence
  Synthetic
gcgccactggccacgtggttgctgttgg

SEQ ID NO: 2149 - DNA, 28 bp, Artificial Sequence
  Synthetic
tccccggcgccactggccacgtggttgc

SEQ ID NO: 2150 - DNA, 28 bp, Artificial Sequence
  Synthetic
tctcaatggctttcccctgggtgatgca

SEQ ID NO: 2151 - DNA, 28 bp, Artificial Sequence
  Synthetic
tgggtctcaatggctttcccctgggtga

SEQ ID NO: 2152 - DNA, 30 bp, Artificial Sequence; identical to SEQ ID NO: 2113
  Synthetic

SEQ ID NO: 2153 - DNA, 30 bp, Artificial Sequence; identical to SEQ ID NO: 2145
  Synthetic

SEQ ID NO: 2154 - DNA, 30 bp, Artificial Sequence; identical to SEQ ID NO: 2073
  Synthetic

SEQ ID NO: 2155 - DNA, 30 bp, Artificial Sequence; identical to SEQ ID NO: 2072
  Synthetic

SEQ ID NO: 2156 - DNA, 30 bp, Artificial Sequence; identical to SEQ ID NO: 2079
  Synthetic

SEQ ID NO: 2157 - DNA, 30 bp, Artificial Sequence; identical to SEQ ID NO: 2091
  Synthetic

SEQ ID NO: 2158 - DNA, 28 bp, Artificial Sequence
  Synthetic
tatcaaccaataatagtctgaatgtcat

SEQ ID NO: 2159 - DNA, 28 bp, Artificial Sequence
  Synthetic
ttgcttcaggaccatatttctctacacc

SEQ ID NO: 2160 - DNA, 28 bp, Artificial Sequence
  Synthetic
gcgccactggccacgtggttgctgttgg

SEQ ID NO: 2161 - DNA, 28 bp, Artificial Sequence
  Synthetic
tccccggcgccactggccacgtggttgc

SEQ ID NO: 2162 - DNA, 28 bp, Artificial Sequence
  Synthetic
tctcaatggctttcccctgggtgatgca

SEQ ID NO: 2163 - DNA, 28 bp, Artificial Sequence
  Synthetic
tgggtctcaatggctttcccctgggtga

SEQ ID NO: 2164 - DNA, 30 bp, Artificial Sequence; identical to SEQ ID NO: 2113
  Synthetic

SEQ ID NO: 2165 - DNA, 30 bp, Artificial Sequence; identical to SEQ ID NO: 2145
  Synthetic

SEQ ID NO: 2166 - DNA, 30 bp, Artificial Sequence; identical to SEQ ID NO: 2073
  Synthetic

SEQ ID NO: 2167 - DNA, 30 bp, Artificial Sequence; identical to SEQ ID NO: 2072
  Synthetic

SEQ ID NO: 2168 - DNA, 30 bp, Artificial Sequence; identical to SEQ ID NO: 2079
  Synthetic

SEQ ID NO: 2169 - DNA, 30 bp, Artificial Sequence; identical to SEQ ID NO: 2091
  Synthetic

SEQ ID NO: 2170 - DNA, 28 bp, Artificial Sequence
  Synthetic
gcacgctggaggggtcgagcacgctcac

SEQ ID NO: 2171 - DNA, 28 bp, Artificial Sequence
  Synthetic
catcgcagagcacgctggaggggtcgag

SEQ ID NO: 2172 - DNA, 28 bp, Artificial Sequence
  Synthetic
gcacgctggaggggtcgagcacgctcac

SEQ ID NO: 2173 - DNA, 28 bp, Artificial Sequence
  Synthetic
catcgcagagcacgctggaggggtcgag

SEQ ID NO: 2174 - DNA, 30 bp, Artificial Sequence; identical to SEQ ID NO: 2113
  Synthetic

SEQ ID NO: 2175 - DNA, 30 bp, Artificial Sequence; identical to SEQ ID NO: 2145
  Synthetic

SEQ ID NO: 2176 - DNA, 30 bp, Artificial Sequence; identical to SEQ ID NO: 2113
  Synthetic

SEQ ID NO: 2177 - DNA, 30 bp, Artificial Sequence; identical to SEQ ID NO: 2145
  Synthetic

SEQ ID NO: 2178 - DNA, 28 bp, Artificial Sequence
  Synthetic
aagatgtggatttttacatagtaaaaat

SEQ ID NO: 2179 - DNA, 30 bp, Artificial Sequence; identical to SEQ ID NO: 2113
  Synthetic

SEQ ID NO: 2180 - DNA, 28 bp, Artificial Sequence
  Synthetic
aagatgtggatttttacatagtaaaaat

SEQ ID NO: 2181 - DNA, 30 bp, Artificial Sequence; identical to SEQ ID NO: 2113
  Synthetic

SEQ ID NO: 2182 - DNA, 28 bp, Artificial Sequence
  Synthetic
aagatgtggatttttacatagtaaaaat

SEQ ID NO: 2183 - DNA, 28 bp, Artificial Sequence
  Synthetic
atttctagaattgaaggaattaaaccaa

SEQ ID NO: 2184 - DNA, 28 bp, Artificial Sequence
  Synthetic
aagatgtggatttttacatagtaaaaat

SEQ ID NO: 2185 - DNA, 28 bp, Artificial Sequence
  Synthetic
ggggtggagtagagggcgcgaccaagag

SEQ ID NO: 2186 - DNA, 30 bp, Artificial Sequence
  Synthetic
acgccaagcttgcatgcctgcaggtcgagt

SEQ ID NO: 2187 - DNA, 28 bp, Artificial Sequence
  Synthetic
actccctagaaccacgacagtttgcctt

SEQ ID NO: 2188 - DNA, 30 bp, Artificial Sequence
  Synthetic
tttgcttctgtccagtgagcatggtcttcg

SEQ ID NO: 2189 - DNA, 20 bp, Artificial Sequence
  Synthetic
ctgtgtttatccgctcacaa

SEQ ID NO: 2190 - DNA, 36 bp, Artificial Sequence
  Synthetic
gatttagactaccccaaaaacgaaggggactaaaac

SEQ ID NO: 2191 - DNA, 36 bp, Artificial Sequence; identical to SEQ ID NO: 2190
  Synthetic

SEQ ID NO: 2192 - DNA, 36 bp, Artificial Sequence; identical to SEQ ID NO: 2190
  Synthetic

SEQ ID NO: 2193 - DNA, 36 bp, Artificial Sequence; identical to SEQ ID NO: 2190
  Synthetic

SEQ ID NO: 2194 - DNA, 36 bp, Artificial Sequence; identical to SEQ ID NO: 2190
  Synthetic

SEQ ID NO: 2195 - DNA, 36 bp, Artificial Sequence; identical to SEQ ID NO: 2190
  Synthetic

SEQ ID NO: 2196 - DNA, 36 bp, Artificial Sequence; identical to SEQ ID NO: 2190
  Synthetic

SEQ ID NO: 2197 - DNA, 36 bp, Artificial Sequence; identical to SEQ ID NO: 2190
  Synthetic

SEQ ID NO: 2198 - DNA, 36 bp, Artificial Sequence; identical to SEQ ID NO: 2190
  Synthetic

SEQ ID NO: 2199 - DNA, 36 bp, Artificial Sequence; identical to SEQ ID NO: 2190
  Synthetic

SEQ ID NO: 2200 - DNA, 36 bp, Artificial Sequence; identical to SEQ ID NO: 2190
  Synthetic

SEQ ID NO: 2201 - DNA, 36 bp, Artificial Sequence; identical to SEQ ID NO: 2190
  Synthetic

SEQ ID NO: 2202 - DNA, 36 bp, Artificial Sequence; identical to SEQ ID NO: 2190
  Synthetic

SEQ ID NO: 2203 - DNA, 36 bp, Artificial Sequence; identical to SEQ ID NO: 2190
  Synthetic

SEQ ID NO: 2204 - DNA, 36 bp, Artificial Sequence; identical to SEQ ID NO: 2190
  Synthetic

SEQ ID NO: 2205 - DNA, 36 bp, Artificial Sequence; identical to SEQ ID NO: 2190
  Synthetic

SEQ ID NO: 2206 - DNA, 36 bp, Artificial Sequence; identical to SEQ ID NO: 2190
  Synthetic

SEQ ID NO: 2207 - DNA, 36 bp, Artificial Sequence; identical to SEQ ID NO: 2190
  Synthetic

SEQ ID NO: 2208 - DNA, 36 bp, Artificial Sequence; identical to SEQ ID NO: 2190
  Synthetic

SEQ ID NO: 2209 - DNA, 36 bp, Artificial Sequence; identical to SEQ ID NO: 2190
  Synthetic

SEQ ID NO: 2210 - DNA, 36 bp, Artificial Sequence; identical to SEQ ID NO: 2190
  Synthetic

SEQ ID NO: 2211 - DNA, 36 bp, Artificial Sequence; identical to SEQ ID NO: 2190
  Synthetic

SEQ ID NO: 2212 - DNA, 36 bp, Artificial Sequence; identical to SEQ ID NO: 2190
  Synthetic

SEQ ID NO: 2213 - DNA, 36 bp, Artificial Sequence; identical to SEQ ID NO: 2190
  Synthetic

SEQ ID NO: 2214 - DNA, 36 bp, Artificial Sequence; identical to SEQ ID NO: 2190
  Synthetic

SEQ ID NO: 2215 - DNA, 36 bp, Artificial Sequence; identical to SEQ ID NO: 2190
  Synthetic

SEQ ID NO: 2216 - DNA, 36 bp, Artificial Sequence; identical to SEQ ID NO: 2190
  Synthetic

SEQ ID NO: 2217 - DNA, 36 bp, Artificial Sequence; identical to SEQ ID NO: 2190
  Synthetic

SEQ ID NO: 2218 - DNA, 36 bp, Artificial Sequence; identical to SEQ ID NO: 2190
  Synthetic

SEQ ID NO: 2219 - DNA, 36 bp, Artificial Sequence; identical to SEQ ID NO: 2190
  Synthetic

SEQ ID NO: 2220 - DNA, 36 bp, Artificial Sequence; identical to SEQ ID NO: 2190
  Synthetic

SEQ ID NO: 2221 - DNA, 36 bp, Artificial Sequence; identical to SEQ ID NO: 2190
  Synthetic

SEQ ID NO: 2222 - DNA, 36 bp, Artificial Sequence; identical to SEQ ID NO: 2190
  Synthetic

SEQ ID NO: 2223 - DNA, 36 bp, Artificial Sequence; identical to SEQ ID NO: 2190
  Synthetic

SEQ ID NO: 2224 - DNA, 36 bp, Artificial Sequence; identical to SEQ ID NO: 2190
  Synthetic

SEQ ID NO: 2225 - DNA, 36 bp, Artificial Sequence; identical to SEQ ID NO: 2190
  Synthetic

SEQ ID NO: 2226 - DNA, 36 bp, Artificial Sequence; identical to SEQ ID NO: 2190
  Synthetic

SEQ ID NO: 2227 - DNA, 36 bp, Artificial Sequence; identical to SEQ ID NO: 2190
  Synthetic

SEQ ID NO: 2228 - DNA, 36 bp, Artificial Sequence; identical to SEQ ID NO: 2190
  Synthetic

SEQ ID NO: 2229 - DNA, 36 bp, Artificial Sequence; identical to SEQ ID NO: 2190
  Synthetic

SEQ ID NO: 2230 - DNA, 36 bp, Artificial Sequence; identical to SEQ ID NO: 2190
  Synthetic

SEQ ID NO: 2231 - DNA, 36 bp, Artificial Sequence; identical to SEQ ID NO: 2190
  Synthetic

SEQ ID NO: 2232 - DNA, 36 bp, Artificial Sequence; identical to SEQ ID NO: 2190
  Synthetic

SEQ ID NO: 2233 - DNA, 36 bp, Artificial Sequence; identical to SEQ ID NO: 2190
  Synthetic

SEQ ID NO: 2234 - DNA, 36 bp, Artificial Sequence; identical to SEQ ID NO: 2190
  Synthetic

SEQ ID NO: 2235 - DNA, 36 bp, Artificial Sequence; identical to SEQ ID NO: 2190
  Synthetic

SEQ ID NO: 2236 - DNA, 36 bp, Artificial Sequence; identical to SEQ ID NO: 2190
  Synthetic

SEQ ID NO: 2237 - DNA, 36 bp, Artificial Sequence; identical to SEQ ID NO: 2190
  Synthetic

SEQ ID NO: 2238 - DNA, 36 bp, Artificial Sequence; identical to SEQ ID NO: 2190
  Synthetic

SEQ ID NO: 2239 - DNA, 36 bp, Artificial Sequence; identical to SEQ ID NO: 2190
  Synthetic

SEQ ID NO: 2240 - DNA, 36 bp, Artificial Sequence; identical to SEQ ID NO: 2190
  Synthetic

SEQ ID NO: 2241 - DNA, 36 bp, Artificial Sequence; identical to SEQ ID NO: 2190
  Synthetic

SEQ ID NO: 2242 - DNA, 36 bp, Artificial Sequence; identical to SEQ ID NO: 2190
  Synthetic

SEQ ID NO: 2243 - DNA, 36 bp, Artificial Sequence; identical to SEQ ID NO: 2190
  Synthetic

SEQ ID NO: 2244 - DNA, 36 bp, Artificial Sequence; identical to SEQ ID NO: 2190
  Synthetic

SEQ ID NO: 2245 - DNA, 36 bp, Artificial Sequence; identical to SEQ ID NO: 2190
  Synthetic

SEQ ID NO: 2246 - DNA, 36 bp, Artificial Sequence; identical to SEQ ID NO: 2190
  Synthetic

SEQ ID NO: 2247 - DNA, 36 bp, Artificial Sequence; identical to SEQ ID NO: 2190
  Synthetic

SEQ ID NO: 2248 - DNA, 36 bp, Artificial Sequence; identical to SEQ ID NO: 2190
  Synthetic

SEQ ID NO: 2249 - DNA, 36 bp, Artificial Sequence; identical to SEQ ID NO: 2190
  Synthetic

SEQ ID NO: 2250 - DNA, 36 bp, Artificial Sequence; identical to SEQ ID NO: 2190
  Synthetic

SEQ ID NO: 2251 - DNA, 36 bp, Artificial Sequence; identical to SEQ ID NO: 2190
  Synthetic

SEQ ID NO: 2252 - DNA, 36 bp, Artificial Sequence; identical to SEQ ID NO: 2190
  Synthetic

SEQ ID NO: 2253 - DNA, 36 bp, Artificial Sequence; identical to SEQ ID NO: 2190
  Synthetic

SEQ ID NO: 2254 - DNA, 36 bp, Artificial Sequence; identical to SEQ ID NO: 2190
  Synthetic

SEQ ID NO: 2255 - DNA, 36 bp, Artificial Sequence; identical to SEQ ID NO: 2190
  Synthetic

SEQ ID NO: 2256 - DNA, 36 bp, Artificial Sequence; identical to SEQ ID NO: 2190
  Synthetic

SEQ ID NO: 2257 - DNA, 36 bp, Artificial Sequence; identical to SEQ ID NO: 2190
  Synthetic

SEQ ID NO: 2258 - DNA, 36 bp, Artificial Sequence; identical to SEQ ID NO: 2190
  Synthetic

SEQ ID NO: 2259 - DNA, 36 bp, Artificial Sequence; identical to SEQ ID NO: 2190
  Synthetic

SEQ ID NO: 2260 - DNA, 36 bp, Artificial Sequence; identical to SEQ ID NO: 2190
  Synthetic

SEQ ID NO: 2261 - DNA, 36 bp, Artificial Sequence; identical to SEQ ID NO: 2190
  Synthetic

SEQ ID NO: 2262 - DNA, 36 bp, Artificial Sequence; identical to SEQ ID NO: 2190
  Synthetic

SEQ ID NO: 2263 - DNA, 36 bp, Artificial Sequence; identical to SEQ ID NO: 2190
  Synthetic

SEQ ID NO: 2264 - DNA, 36 bp, Artificial Sequence; identical to SEQ ID NO: 2190
  Synthetic

SEQ ID NO: 2265 - DNA, 36 bp, Artificial Sequence; identical to SEQ ID NO: 2190
  Synthetic

SEQ ID NO: 2266 - DNA, 36 bp, Artificial Sequence; identical to SEQ ID NO: 2190
  Synthetic

SEQ ID NO: 2267 - DNA, 36 bp, Artificial Sequence; identical to SEQ ID NO: 2190
  Synthetic

SEQ ID NO: 2268 - DNA, 36 bp, Artificial Sequence; identical to SEQ ID NO: 2190
  Synthetic

SEQ ID NO: 2269 - DNA, 36 bp, Artificial Sequence; identical to SEQ ID NO: 2190
  Synthetic

SEQ ID NO: 2270 - DNA, 36 bp, Artificial Sequence; identical to SEQ ID NO: 2190
  Synthetic

SEQ ID NO: 2271 - DNA, 36 bp, Artificial Sequence; identical to SEQ ID NO: 2190
  Synthetic

SEQ ID NO: 2272 - DNA, 36 bp, Artificial Sequence; identical to SEQ ID NO: 2190
  Synthetic

SEQ ID NO: 2273 - DNA, 36 bp, Artificial Sequence; identical to SEQ ID NO: 2190
  Synthetic

SEQ ID NO: 2274 - DNA, 36 bp, Artificial Sequence; identical to SEQ ID NO: 2190
  Synthetic

SEQ ID NO: 2275 - DNA, 36 bp, Artificial Sequence; identical to SEQ ID NO: 2190
  Synthetic

SEQ ID NO: 2276 - DNA, 36 bp, Artificial Sequence; identical to SEQ ID NO: 2190
  Synthetic

SEQ ID NO: 2277 - DNA, 36 bp, Artificial Sequence; identical to SEQ ID NO: 2190
  Synthetic

SEQ ID NO: 2278 - DNA, 36 bp, Artificial Sequence; identical to SEQ ID NO: 2190
  Synthetic

SEQ ID NO: 2279 - DNA, 36 bp, Artificial Sequence; identical to SEQ ID NO: 2190
  Synthetic

SEQ ID NO: 2280 - DNA, 36 bp, Artificial Sequence; identical to SEQ ID NO: 2190
  Synthetic

SEQ ID NO: 2281 - DNA, 36 bp, Artificial Sequence; identical to SEQ ID NO: 2190
  Synthetic

SEQ ID NO: 2282 - DNA, 36 bp, Artificial Sequence; identical to SEQ ID NO: 2190
  Synthetic

SEQ ID NO: 2283 - DNA, 36 bp, Artificial Sequence; identical to SEQ ID NO: 2190
  Synthetic

SEQ ID NO: 2284 - DNA, 36 bp, Artificial Sequence; identical to SEQ ID NO: 2190
  Synthetic

SEQ ID NO: 2285 - DNA, 36 bp, Artificial Sequence; identical to SEQ ID NO: 2190
  Synthetic

SEQ ID NO: 2286 - DNA, 36 bp, Artificial Sequence; identical to SEQ ID NO: 2190
  Synthetic

SEQ ID NO: 2287 - DNA, 36 bp, Artificial Sequence; identical to SEQ ID NO: 2190
  Synthetic

SEQ ID NO: 2288 - DNA, 36 bp, Artificial Sequence; identical to SEQ ID NO: 2190
  Synthetic

SEQ ID NO: 2289 - DNA, 36 bp, Artificial Sequence; identical to SEQ ID NO: 2190
  Synthetic

SEQ ID NO: 2290 - DNA, 36 bp, Artificial Sequence; identical to SEQ ID NO: 2190
  Synthetic

SEQ ID NO: 2291 - DNA, 36 bp, Artificial Sequence; identical to SEQ ID NO: 2190
  Synthetic

SEQ ID NO: 2292 - DNA, 36 bp, Artificial Sequence; identical to SEQ ID NO: 2190
  Synthetic

SEQ ID NO: 2293 - DNA, 36 bp, Artificial Sequence; identical to SEQ ID NO: 2190
  Synthetic

SEQ ID NO: 2294 - DNA, 36 bp, Artificial Sequence; identical to SEQ ID NO: 2190
  Synthetic

SEQ ID NO: 2295 - DNA, 36 bp, Artificial Sequence; identical to SEQ ID NO: 2190
  Synthetic

SEQ ID NO: 2296 - DNA, 36 bp, Artificial Sequence; identical to SEQ ID NO: 2190
  Synthetic

SEQ ID NO: 2297 - DNA, 36 bp, Artificial Sequence; identical to SEQ ID NO: 2190
  Synthetic

SEQ ID NO: 2298 - DNA, 36 bp, Artificial Sequence; identical to SEQ ID NO: 2190
  Synthetic

SEQ ID NO: 2299 - DNA, 36 bp, Artificial Sequence; identical to SEQ ID NO: 2190
  Synthetic

SEQ ID NO: 2300 - DNA, 36 bp, Artificial Sequence; identical to SEQ ID NO: 2190
  Synthetic

SEQ ID NO: 2301 - DNA, 36 bp, Artificial Sequence; identical to SEQ ID NO: 2190
  Synthetic

SEQ ID NO: 2302 - DNA, 36 bp, Artificial Sequence; identical to SEQ ID NO: 2190
  Synthetic

SEQ ID NO: 2303 - DNA, 36 bp, Artificial Sequence; identical to SEQ ID NO: 2190
  Synthetic

SEQ ID NO: 2304 - DNA, 36 bp, Artificial Sequence; identical to SEQ ID NO: 2190
  Synthetic

SEQ ID NO: 2305 - DNA, 36 bp, Artificial Sequence; identical to SEQ ID NO: 2190
  Synthetic

SEQ ID NO: 2306 - DNA, 36 bp, Artificial Sequence; identical to SEQ ID NO: 2190
  Synthetic

SEQ ID NO: 2307 - DNA, 36 bp, Artificial Sequence; identical to SEQ ID NO: 2190
  Synthetic

SEQ ID NO: 2308 - DNA, 36 bp, Artificial Sequence; identical to SEQ ID NO: 2190
  Synthetic

SEQ ID NO: 2309 - DNA, 36 bp, Artificial Sequence; identical to SEQ ID NO: 2190
  Synthetic

SEQ ID NO: 2310 - DNA, 36 bp, Artificial Sequence; identical to SEQ ID NO: 2190
  Synthetic

SEQ ID NO: 2311 - DNA, 36 bp, Artificial Sequence; identical to SEQ ID NO: 2190
  Synthetic

SEQ ID NO: 2312 - DNA, 36 bp, Artificial Sequence; identical to SEQ ID NO: 2190
  Synthetic

SEQ ID NO: 2313 - DNA, 36 bp, Artificial Sequence; identical to SEQ ID NO: 2190
  Synthetic

SEQ ID NO: 2314 - DNA, 36 bp, Artificial Sequence; identical to SEQ ID NO: 2190
  Synthetic

SEQ ID NO: 2315 - DNA, 36 bp, Artificial Sequence; identical to SEQ ID NO: 2190
  Synthetic

SEQ ID NO: 2316 - DNA, 36 bp, Artificial Sequence; identical to SEQ ID NO: 2190
  Synthetic

SEQ ID NO: 2317 - DNA, 36 bp, Artificial Sequence; identical to SEQ ID NO: 2190
  Synthetic

SEQ ID NO: 2318 - DNA, 36 bp, Artificial Sequence; identical to SEQ ID NO: 2190
  Synthetic

SEQ ID NO: 2319 - DNA, 36 bp, Artificial Sequence; identical to SEQ ID NO: 2190
  Synthetic

SEQ ID NO: 2320 - DNA, 36 bp, Artificial Sequence; identical to SEQ ID NO: 2190
  Synthetic

SEQ ID NO: 2321 - DNA, 36 bp, Artificial Sequence; identical to SEQ ID NO: 2190
  Synthetic

SEQ ID NO: 2322 - DNA, 36 bp, Artificial Sequence; identical to SEQ ID NO: 2190
  Synthetic

SEQ ID NO: 2323 - DNA, 36 bp, Artificial Sequence; identical to SEQ ID NO: 2190
  Synthetic

SEQ ID NO: 2324 - DNA, 36 bp, Artificial Sequence; identical to SEQ ID NO: 2190
  Synthetic

SEQ ID NO: 2325 - DNA, 36 bp, Artificial Sequence; identical to SEQ ID NO: 2190
  Synthetic

SEQ ID NO: 2326 - DNA, 36 bp, Artificial Sequence; identical to SEQ ID NO: 2190
  Synthetic

SEQ ID NO: 2327 - DNA, 36 bp, Artificial Sequence; identical to SEQ ID NO: 2190
  Synthetic

SEQ ID NO: 2328 - DNA, 36 bp, Artificial Sequence; identical to SEQ ID NO: 2190
  Synthetic

SEQ ID NO: 2329 - DNA, 36 bp, Artificial Sequence; identical to SEQ ID NO: 2190
  Synthetic

SEQ ID NO: 2330 - DNA, 36 bp, Artificial Sequence; identical to SEQ ID NO: 2190
  Synthetic

SEQ ID NO: 2331 - DNA, 36 bp, Artificial Sequence; identical to SEQ ID NO: 2190
  Synthetic

SEQ ID NO: 2332 - DNA, 36 bp, Artificial Sequence; identical to SEQ ID NO: 2190
  Synthetic

SEQ ID NO: 2333 - DNA, 36 bp, Artificial Sequence; identical to SEQ ID NO: 2190
  Synthetic

SEQ ID NO: 2334 - DNA, 36 bp, Artificial Sequence; identical to SEQ ID NO: 2190
  Synthetic

SEQ ID NO: 2335 - DNA, 36 bp, Artificial Sequence; identical to SEQ ID NO: 2190
  Synthetic

SEQ ID NO: 2336 - DNA, 36 bp, Artificial Sequence; identical to SEQ ID NO: 2190
  Synthetic

SEQ ID NO: 2337 - DNA, 36 bp, Artificial Sequence; identical to SEQ ID NO: 2190
  Synthetic

SEQ ID NO: 2338 - DNA, 36 bp, Artificial Sequence; identical to SEQ ID NO: 2190
  Synthetic

SEQ ID NO: 2339 - DNA, 36 bp, Artificial Sequence; identical to SEQ ID NO: 2190
  Synthetic

SEQ ID NO: 2340 - DNA, 36 bp, Artificial Sequence; identical to SEQ ID NO: 2190
  Synthetic

SEQ ID NO: 2341 - DNA, 36 bp, Artificial Sequence; identical to SEQ ID NO: 2190
  Synthetic

SEQ ID NO: 2342 - DNA, 36 bp, Artificial Sequence; identical to SEQ ID NO: 2190
  Synthetic

SEQ ID NO: 2343 - DNA, 36 bp, Artificial Sequence; identical to SEQ ID NO: 2190
  Synthetic

SEQ ID NO: 2344 - DNA, 36 bp, Artificial Sequence; identical to SEQ ID NO: 2190
  Synthetic

SEQ ID NO: 2345 - DNA, 36 bp, Artificial Sequence; identical to SEQ ID NO: 2190
  Synthetic

SEQ ID NO: 2346 - DNA, 36 bp, Artificial Sequence; identical to SEQ ID NO: 2190
  Synthetic

SEQ ID NO: 2347 - DNA, 36 bp, Artificial Sequence; identical to SEQ ID NO: 2190
  Synthetic

SEQ ID NO: 2348 - DNA, 36 bp, Artificial Sequence; identical to SEQ ID NO: 2190
  Synthetic

SEQ ID NO: 2349 - DNA, 36 bp, Artificial Sequence; identical to SEQ ID NO: 2190
  Synthetic

SEQ ID NO: 2350 - DNA, 36 bp, Artificial Sequence; identical to SEQ ID NO: 2190
  Synthetic

SEQ ID NO: 2351 - DNA, 36 bp, Artificial Sequence; identical to SEQ ID NO: 2190
  Synthetic

SEQ ID NO: 2352 - DNA, 36 bp, Artificial Sequence; identical to SEQ ID NO: 2190
  Synthetic

SEQ ID NO: 2353 - DNA, 36 bp, Artificial Sequence; identical to SEQ ID NO: 2190
  Synthetic

SEQ ID NO: 2354 - DNA, 36 bp, Artificial Sequence; identical to SEQ ID NO: 2190
  Synthetic

SEQ ID NO: 2355 - DNA, 36 bp, Artificial Sequence; identical to SEQ ID NO: 2190
  Synthetic

SEQ ID NO: 2356 - DNA, 36 bp, Artificial Sequence; identical to SEQ ID NO: 2190
  Synthetic

SEQ ID NO: 2357 - DNA, 36 bp, Artificial Sequence; identical to SEQ ID NO: 2190
  Synthetic

SEQ ID NO: 2358 - DNA, 36 bp, Artificial Sequence; identical to SEQ ID NO: 2190
  Synthetic

SEQ ID NO: 2359 - DNA, 36 bp, Artificial Sequence; identical to SEQ ID NO: 2190
  Synthetic

SEQ ID NO: 2360 - DNA, 36 bp, Artificial Sequence; identical to SEQ ID NO: 2190
  Synthetic

SEQ ID NO: 2361 - DNA, 36 bp, Artificial Sequence; identical to SEQ ID NO: 2190
  Synthetic

SEQ ID NO: 2362 - DNA, 36 bp, Artificial Sequence; identical to SEQ ID NO: 2190
  Synthetic

SEQ ID NO: 2363 - DNA, 36 bp, Artificial Sequence; identical to SEQ ID NO: 2190
  Synthetic

SEQ ID NO: 2364 - DNA, 36 bp, Artificial Sequence; identical to SEQ ID NO: 2190
  Synthetic

SEQ ID NO: 2365 - DNA, 36 bp, Artificial Sequence; identical to SEQ ID NO: 2190
  Synthetic

SEQ ID NO: 2366 - DNA, 36 bp, Artificial Sequence; identical to SEQ ID NO: 2190
  Synthetic

SEQ ID NO: 2367 - DNA, 36 bp, Artificial Sequence; identical to SEQ ID NO: 2190
  Synthetic

SEQ ID NO: 2368 - DNA, 36 bp, Artificial Sequence; identical to SEQ ID NO: 2190
  Synthetic

SEQ ID NO: 2369 - DNA, 36 bp, Artificial Sequence; identical to SEQ ID NO: 2190
  Synthetic

SEQ ID NO: 2370 - DNA, 36 bp, Artificial Sequence; identical to SEQ ID NO: 2190
  Synthetic

SEQ ID NO: 2371 - DNA, 36 bp, Artificial Sequence; identical to SEQ ID NO: 2190
  Synthetic

SEQ ID NO: 2372 - DNA, 36 bp, Artificial Sequence; identical to SEQ ID NO: 2190
  Synthetic

SEQ ID NO: 2373 - DNA, 36 bp, Artificial Sequence; identical to SEQ ID NO: 2190
  Synthetic

SEQ ID NO: 2374 - DNA, 36 bp, Artificial Sequence; identical to SEQ ID NO: 2190
  Synthetic

SEQ ID NO: 2375 - DNA, 36 bp, Artificial Sequence; identical to SEQ ID NO: 2190
  Synthetic

SEQ ID NO: 2376 - DNA, 36 bp, Artificial Sequence; identical to SEQ ID NO: 2190
  Synthetic

SEQ ID NO: 2377 - DNA, 36 bp, Artificial Sequence; identical to SEQ ID NO: 2190
  Synthetic

SEQ ID NO: 2378 - DNA, 36 bp, Artificial Sequence; identical to SEQ ID NO: 2190
  Synthetic

SEQ ID NO: 2379 - DNA, 36 bp, Artificial Sequence; identical to SEQ ID NO: 2190
  Synthetic

SEQ ID NO: 2380 - DNA, 36 bp, Artificial Sequence; identical to SEQ ID NO: 2190
  Synthetic

SEQ ID NO: 2381 - DNA, 36 bp, Artificial Sequence; identical to SEQ ID NO: 2190
  Synthetic

SEQ ID NO: 2382 - DNA, 36 bp, Artificial Sequence; identical to SEQ ID NO: 2190
  Synthetic

SEQ ID NO: 2383 - DNA, 36 bp, Artificial Sequence; identical to SEQ ID NO: 2190
  Synthetic

SEQ ID NO: 2384 - DNA, 36 bp, Artificial Sequence; identical to SEQ ID NO: 2190
  Synthetic

SEQ ID NO: 2385 - DNA, 36 bp, Artificial Sequence; identical to SEQ ID NO: 2190
  Synthetic

SEQ ID NO: 2386 - DNA, 36 bp, Artificial Sequence; identical to SEQ ID NO: 2190
  Synthetic

SEQ ID NO: 2387 - DNA, 36 bp, Artificial Sequence; identical to SEQ ID NO: 2190
  Synthetic

SEQ ID NO: 2388 - DNA, 36 bp, Artificial Sequence; identical to SEQ ID NO: 2190
  Synthetic

SEQ ID NO: 2389 - DNA, 36 bp, Artificial Sequence; identical to SEQ ID NO: 2190
  Synthetic

SEQ ID NO: 2390 - DNA, 36 bp, Artificial Sequence; identical to SEQ ID NO: 2190
  Synthetic

SEQ ID NO: 2391 - DNA, 36 bp, Artificial Sequence; identical to SEQ ID NO: 2190
  Synthetic

SEQ ID NO: 2392 - DNA, 36 bp, Artificial Sequence; identical to SEQ ID NO: 2190
  Synthetic

SEQ ID NO: 2393 - DNA, 36 bp, Artificial Sequence; identical to SEQ ID NO: 2190
  Synthetic

SEQ ID NO: 2394 - DNA, 36 bp, Artificial Sequence; identical to SEQ ID NO: 2190
  Synthetic

SEQ ID NO: 2395 - DNA, 36 bp, Artificial Sequence; identical to SEQ ID NO: 2190
  Synthetic

SEQ ID NO: 2396 - DNA, 36 bp, Artificial Sequence; identical to SEQ ID NO: 2190
  Synthetic

SEQ ID NO: 2397 - DNA, 36 bp, Artificial Sequence; identical to SEQ ID NO: 2190
  Synthetic

SEQ ID NO: 2398 - DNA, 36 bp, Artificial Sequence; identical to SEQ ID NO: 2190
  Synthetic

SEQ ID NO: 2399 - DNA, 36 bp, Artificial Sequence; identical to SEQ ID NO: 2190
  Synthetic

SEQ ID NO: 2400 - DNA, 36 bp, Artificial Sequence; identical to SEQ ID NO: 2190
  Synthetic

SEQ ID NO: 2401 - DNA, 36 bp, Artificial Sequence; identical to SEQ ID NO: 2190
  Synthetic

SEQ ID NO: 2402 - DNA, 36 bp, Artificial Sequence; identical to SEQ ID NO: 2190
  Synthetic

SEQ ID NO: 2403 - DNA, 36 bp, Artificial Sequence; identical to SEQ ID NO: 2190
  Synthetic

SEQ ID NO: 2404 - DNA, 36 bp, Artificial Sequence; identical to SEQ ID NO: 2190
  Synthetic

SEQ ID NO: 2405 - DNA, 36 bp, Artificial Sequence; identical to SEQ ID NO: 2190
  Synthetic

SEQ ID NO: 2406 - DNA, 36 bp, Artificial Sequence; identical to SEQ ID NO: 2190
  Synthetic

SEQ ID NO: 2407 - DNA, 36 bp, Artificial Sequence; identical to SEQ ID NO: 2190
  Synthetic

SEQ ID NO: 2408 - DNA, 36 bp, Artificial Sequence; identical to SEQ ID NO: 2190
  Synthetic

SEQ ID NO: 2409 - DNA, 36 bp, Artificial Sequence; identical to SEQ ID NO: 2190
  Synthetic

SEQ ID NO: 2410 - DNA, 36 bp, Artificial Sequence; identical to SEQ ID NO: 2190
  Synthetic

SEQ ID NO: 2411 - DNA, 36 bp, Artificial Sequence; identical to SEQ ID NO: 2190
  Synthetic

SEQ ID NO: 2412 - DNA, 36 bp, Artificial Sequence; identical to SEQ ID NO: 2190
  Synthetic

SEQ ID NO: 2413 - DNA, 36 bp, Artificial Sequence; identical to SEQ ID NO: 2190
  Synthetic

SEQ ID NO: 2414 - DNA, 36 bp, Artificial Sequence; identical to SEQ ID NO: 2190
  Synthetic

SEQ ID NO: 2415 - DNA, 36 bp, Artificial Sequence; identical to SEQ ID NO: 2190
  Synthetic

SEQ ID NO: 2416 - DNA, 36 bp, Artificial Sequence; identical to SEQ ID NO: 2190
  Synthetic

SEQ ID NO: 2417 - DNA, 36 bp, Artificial Sequence; identical to SEQ ID NO: 2190
  Synthetic

SEQ ID NO: 2418 - DNA, 36 bp, Artificial Sequence; identical to SEQ ID NO: 2190
  Synthetic

SEQ ID NO: 2419 - DNA, 36 bp, Artificial Sequence; identical to SEQ ID NO: 2190
  Synthetic

SEQ ID NO: 2420 - DNA, 36 bp, Artificial Sequence; identical to SEQ ID NO: 2190
  Synthetic

SEQ ID NO: 2421 - DNA, 36 bp, Artificial Sequence; identical to SEQ ID NO: 2190
  Synthetic

SEQ ID NO: 2422 - DNA, 36 bp, Artificial Sequence; identical to SEQ ID NO: 2190
  Synthetic

SEQ ID NO: 2423 - DNA, 36 bp, Artificial Sequence; identical to SEQ ID NO: 2190
  Synthetic

SEQ ID NO: 2424 - DNA, 36 bp, Artificial Sequence; identical to SEQ ID NO: 2190
  Synthetic

SEQ ID NO: 2425 - DNA, 36 bp, Artificial Sequence; identical to SEQ ID NO: 2190
  Synthetic

SEQ ID NO: 2426 - DNA, 36 bp, Artificial Sequence; identical to SEQ ID NO: 2190
  Synthetic

SEQ ID NO: 2427 - DNA, 36 bp, Artificial Sequence; identical to SEQ ID NO: 2190
  Synthetic

SEQ ID NO: 2428 - DNA, 36 bp, Artificial Sequence; identical to SEQ ID NO: 2190
  Synthetic

SEQ ID NO: 2429 - DNA, 36 bp, Artificial Sequence; identical to SEQ ID NO: 2190
  Synthetic

SEQ ID NO: 2430 - DNA, 36 bp, Artificial Sequence; identical to SEQ ID NO: 2190
  Synthetic

SEQ ID NO: 2431 - DNA, 36 bp, Artificial Sequence; identical to SEQ ID NO: 2190
  Synthetic

SEQ ID NO: 2432 - DNA, 36 bp, Artificial Sequence; identical to SEQ ID NO: 2190
  Synthetic

SEQ ID NO: 2433 - DNA, 36 bp, Artificial Sequence; identical to SEQ ID NO: 2190
  Synthetic

SEQ ID NO: 2434 - DNA, 36 bp, Artificial Sequence; identical to SEQ ID NO: 2190
  Synthetic

SEQ ID NO: 2435 - DNA, 36 bp, Artificial Sequence; identical to SEQ ID NO: 2190
  Synthetic

SEQ ID NO: 2436 - DNA, 36 bp, Artificial Sequence; identical to SEQ ID NO: 2190
  Synthetic

SEQ ID NO: 2437 - DNA, 36 bp, Artificial Sequence; identical to SEQ ID NO: 2190
  Synthetic

SEQ ID NO: 2438 - DNA, 36 bp, Artificial Sequence; identical to SEQ ID NO: 2190
  Synthetic

SEQ ID NO: 2439 - DNA, 36 bp, Artificial Sequence; identical to SEQ ID NO: 2190
  Synthetic

SEQ ID NO: 2440 - DNA, 36 bp, Artificial Sequence; identical to SEQ ID NO: 2190
  Synthetic

SEQ ID NO: 2441 - DNA, 36 bp, Artificial Sequence; identical to SEQ ID NO: 2190
  Synthetic

SEQ ID NO: 2442 - DNA, 36 bp, Artificial Sequence; identical to SEQ ID NO: 2190
  Synthetic

SEQ ID NO: 2443 - DNA, 36 bp, Artificial Sequence; identical to SEQ ID NO: 2190
  Synthetic

SEQ ID NO: 2444 - DNA, 36 bp, Artificial Sequence; identical to SEQ ID NO: 2190
  Synthetic

SEQ ID NO: 2445 - DNA, 36 bp, Artificial Sequence; identical to SEQ ID NO: 2190
  Synthetic

SEQ ID NO: 2446 - DNA, 36 bp, Artificial Sequence; identical to SEQ ID NO: 2190
  Synthetic

SEQ ID NO: 2447 - DNA, 36 bp, Artificial Sequence; identical to SEQ ID NO: 2190
  Synthetic

SEQ ID NO: 2448 - DNA, 36 bp, Artificial Sequence; identical to SEQ ID NO: 2190
  Synthetic

SEQ ID NO: 2449 - DNA, 36 bp, Artificial Sequence; identical to SEQ ID NO: 2190
  Synthetic

SEQ ID NO: 2450 - DNA, 36 bp, Artificial Sequence; identical to SEQ ID NO: 2190
  Synthetic

SEQ ID NO: 2451 - DNA, 36 bp, Artificial Sequence; identical to SEQ ID NO: 2190
  Synthetic

SEQ ID NO: 2452 - DNA, 36 bp, Artificial Sequence; identical to SEQ ID NO: 2190
  Synthetic

SEQ ID NO: 2453 - DNA, 36 bp, Artificial Sequence; identical to SEQ ID NO: 2190
  Synthetic

SEQ ID NO: 2454 - DNA, 36 bp, Artificial Sequence; identical to SEQ ID NO: 2190
  Synthetic

SEQ ID NO: 2455 - DNA, 36 bp, Artificial Sequence; identical to SEQ ID NO: 2190
  Synthetic

SEQ ID NO: 2456 - DNA, 36 bp, Artificial Sequence; identical to SEQ ID NO: 2190
  Synthetic

SEQ ID NO: 2457 - DNA, 36 bp, Artificial Sequence; identical to SEQ ID NO: 2190
  Synthetic

SEQ ID NO: 2458 - DNA, 36 bp, Artificial Sequence; identical to SEQ ID NO: 2190
  Synthetic

SEQ ID NO: 2459 - DNA, 36 bp, Artificial Sequence; identical to SEQ ID NO: 2190
  Synthetic

SEQ ID NO: 2460 - DNA, 36 bp, Artificial Sequence; identical to SEQ ID NO: 2190
  Synthetic

SEQ ID NO: 2461 - DNA, 36 bp, Artificial Sequence; identical to SEQ ID NO: 2190
  Synthetic

SEQ ID NO: 2462 - DNA, 36 bp, Artificial Sequence; identical to SEQ ID NO: 2190
  Synthetic

SEQ ID NO: 2463 - DNA, 36 bp, Artificial Sequence; identical to SEQ ID NO: 2190
  Synthetic

SEQ ID NO: 2464 - DNA, 36 bp, Artificial Sequence; identical to SEQ ID NO: 2190
  Synthetic

SEQ ID NO: 2465 - DNA, 36 bp, Artificial Sequence; identical to SEQ ID NO: 2190
  Synthetic

SEQ ID NO: 2466 - DNA, 36 bp, Artificial Sequence; identical to SEQ ID NO: 2190
  Synthetic

SEQ ID NO: 2467 - DNA, 36 bp, Artificial Sequence; identical to SEQ ID NO: 2190
  Synthetic

SEQ ID NO: 2468 - DNA, 36 bp, Artificial Sequence; identical to SEQ ID NO: 2190
  Synthetic

SEQ ID NO: 2469 - DNA, 36 bp, Artificial Sequence; identical to SEQ ID NO: 2190
  Synthetic

SEQ ID NO: 2470 - DNA, 36 bp, Artificial Sequence; identical to SEQ ID NO: 2190
  Synthetic

SEQ ID NO: 2471 - DNA, 36 bp, Artificial Sequence; identical to SEQ ID NO: 2190
  Synthetic

SEQ ID NO: 2472 - DNA, 36 bp, Artificial Sequence; identical to SEQ ID NO: 2190
  Synthetic

SEQ ID NO: 2473 - DNA, 36 bp, Artificial Sequence; identical to SEQ ID NO: 2190
  Synthetic

SEQ ID NO: 2474 - DNA, 36 bp, Artificial Sequence; identical to SEQ ID NO: 2190
  Synthetic

SEQ ID NO: 2475 - DNA, 36 bp, Artificial Sequence; identical to SEQ ID NO: 2190
  Synthetic

SEQ ID NO: 2476 - DNA, 36 bp, Artificial Sequence; identical to SEQ ID NO: 2190
  Synthetic

SEQ ID NO: 2477 - DNA, 36 bp, Artificial Sequence; identical to SEQ ID NO: 2190
  Synthetic

SEQ ID NO: 2478 - DNA, 36 bp, Artificial Sequence; identical to SEQ ID NO: 2190
  Synthetic

SEQ ID NO: 2479 - DNA, 36 bp, Artificial Sequence; identical to SEQ ID NO: 2190
  Synthetic

SEQ ID NO: 2480 - DNA, 36 bp, Artificial Sequence; identical to SEQ ID NO: 2190
  Synthetic

SEQ ID NO: 2481 - DNA, 36 bp, Artificial Sequence; identical to SEQ ID NO: 2190
  Synthetic

SEQ ID NO: 2482 - DNA, 36 bp, Artificial Sequence; identical to SEQ ID NO: 2190
  Synthetic

SEQ ID NO: 2483 - DNA, 36 bp, Artificial Sequence; identical to SEQ ID NO: 2190
  Synthetic

SEQ ID NO: 2484 - DNA, 36 bp, Artificial Sequence; identical to SEQ ID NO: 2190
  Synthetic

SEQ ID NO: 2485 - DNA, 36 bp, Artificial Sequence; identical to SEQ ID NO: 2190
  Synthetic

SEQ ID NO: 2486 - DNA, 36 bp, Artificial Sequence; identical to SEQ ID NO: 2190
  Synthetic

SEQ ID NO: 2487 - DNA, 36 bp, Artificial Sequence; identical to SEQ ID NO: 2190
  Synthetic

SEQ ID NO: 2488 - DNA, 36 bp, Artificial Sequence; identical to SEQ ID NO: 2190
  Synthetic

SEQ ID NO: 2489 - DNA, 36 bp, Artificial Sequence; identical to SEQ ID NO: 2190
  Synthetic

SEQ ID NO: 2490 - DNA, 36 bp, Artificial Sequence; identical to SEQ ID NO: 2190
  Synthetic

SEQ ID NO: 2491 - DNA, 36 bp, Artificial Sequence; identical to SEQ ID NO: 2190
  Synthetic

SEQ ID NO: 2492 - DNA, 36 bp, Artificial Sequence; identical to SEQ ID NO: 2190
  Synthetic

SEQ ID NO: 2493 - DNA, 36 bp, Artificial Sequence; identical to SEQ ID NO: 2190
  Synthetic

SEQ ID NO: 2494 - DNA, 36 bp, Artificial Sequence; identical to SEQ ID NO: 2190
  Synthetic

SEQ ID NO: 2495 - DNA, 36 bp, Artificial Sequence; identical to SEQ ID NO: 2190
  Synthetic

SEQ ID NO: 2496 - DNA, 36 bp, Artificial Sequence; identical to SEQ ID NO: 2190
  Synthetic

SEQ ID NO: 2497 - DNA, 36 bp, Artificial Sequence; identical to SEQ ID NO: 2190
  Synthetic

SEQ ID NO: 2498 - DNA, 36 bp, Artificial Sequence; identical to SEQ ID NO: 2190
  Synthetic

SEQ ID NO: 2499 - DNA, 36 bp, Artificial Sequence; identical to SEQ ID NO: 2190
  Synthetic

SEQ ID NO: 2500 - DNA, 36 bp, Artificial Sequence; identical to SEQ ID NO: 2190
  Synthetic

SEQ ID NO: 2501 - DNA, 36 bp, Artificial Sequence; identical to SEQ ID NO: 2190
  Synthetic

SEQ ID NO: 2502 - DNA, 36 bp, Artificial Sequence; identical to SEQ ID NO: 2190
  Synthetic

SEQ ID NO: 2503 - DNA, 36 bp, Artificial Sequence; identical to SEQ ID NO: 2190
  Synthetic

SEQ ID NO: 2504 - DNA, 36 bp, Artificial Sequence; identical to SEQ ID NO: 2190
  Synthetic

SEQ ID NO: 2505 - DNA, 36 bp, Artificial Sequence; identical to SEQ ID NO: 2190
  Synthetic

SEQ ID NO: 2506 - DNA, 36 bp, Artificial Sequence; identical to SEQ ID NO: 2190
  Synthetic

SEQ ID NO: 2507 - DNA, 36 bp, Artificial Sequence; identical to SEQ ID NO: 2190
  Synthetic

SEQ ID NO: 2508 - DNA, 36 bp, Artificial Sequence; identical to SEQ ID NO: 2190
  Synthetic

SEQ ID NO: 2509 - DNA, 36 bp, Artificial Sequence; identical to SEQ ID NO: 2190
  Synthetic

SEQ ID NO: 2510 - DNA, 36 bp, Artificial Sequence; identical to SEQ ID NO: 2190
  Synthetic

SEQ ID NO: 2511 - DNA, 36 bp, Artificial Sequence; identical to SEQ ID NO: 2190
  Synthetic

SEQ ID NO: 2512 - DNA, 36 bp, Artificial Sequence; identical to SEQ ID NO: 2190
  Synthetic

SEQ ID NO: 2513 - DNA, 36 bp, Artificial Sequence; identical to SEQ ID NO: 2190
  Synthetic

SEQ ID NO: 2514 - DNA, 36 bp, Artificial Sequence; identical to SEQ ID NO: 2190
  Synthetic

SEQ ID NO: 2515 - DNA, 36 bp, Artificial Sequence; identical to SEQ ID NO: 2190
  Synthetic

SEQ ID NO: 2516 - DNA, 36 bp, Artificial Sequence; identical to SEQ ID NO: 2190
  Synthetic

SEQ ID NO: 2517 - DNA, 36 bp, Artificial Sequence; identical to SEQ ID NO: 2190
  Synthetic

SEQ ID NO: 2518 - DNA, 36 bp, Artificial Sequence; identical to SEQ ID NO: 2190
  Synthetic

SEQ ID NO: 2519 - DNA, 36 bp, Artificial Sequence; identical to SEQ ID NO: 2190
  Synthetic

SEQ ID NO: 2520 - DNA, 36 bp, Artificial Sequence; identical to SEQ ID NO: 2190
  Synthetic

SEQ ID NO: 2521 - DNA, 36 bp, Artificial Sequence; identical to SEQ ID NO: 2190
  Synthetic

SEQ ID NO: 2522 - DNA, 36 bp, Artificial Sequence; identical to SEQ ID NO: 2190
  Synthetic

SEQ ID NO: 2523 - DNA, 36 bp, Artificial Sequence; identical to SEQ ID NO: 2190
  Synthetic

SEQ ID NO: 2524 - DNA, 36 bp, Artificial Sequence; identical to SEQ ID NO: 2190
  Synthetic

SEQ ID NO: 2525 - DNA, 36 bp, Artificial Sequence; identical to SEQ ID NO: 2190
  Synthetic

SEQ ID NO: 2526 - DNA, 36 bp, Artificial Sequence; identical to SEQ ID NO: 2190
  Synthetic

SEQ ID NO: 2527 - DNA, 36 bp, Artificial Sequence; identical to SEQ ID NO: 2190
  Synthetic

SEQ ID NO: 2528 - DNA, 36 bp, Artificial Sequence; identical to SEQ ID NO: 2190
  Synthetic

SEQ ID NO: 2529 - DNA, 36 bp, Artificial Sequence; identical to SEQ ID NO: 2190
  Synthetic

SEQ ID NO: 2530 - DNA, 36 bp, Artificial Sequence; identical to SEQ ID NO: 2190
  Synthetic

SEQ ID NO: 2531 - DNA, 36 bp, Artificial Sequence; identical to SEQ ID NO: 2190
  Synthetic

SEQ ID NO: 2532 - DNA, 36 bp, Artificial Sequence; identical to SEQ ID NO: 2190
  Synthetic

SEQ ID NO: 2533 - DNA, 36 bp, Artificial Sequence; identical to SEQ ID NO: 2190
  Synthetic

SEQ ID NO: 2534 - DNA, 36 bp, Artificial Sequence; identical to SEQ ID NO: 2190
  Synthetic

SEQ ID NO: 2535 - DNA, 36 bp, Artificial Sequence; identical to SEQ ID NO: 2190
  Synthetic

SEQ ID NO: 2536 - DNA, 36 bp, Artificial Sequence; identical to SEQ ID NO: 2190
  Synthetic

SEQ ID NO: 2537 - DNA, 36 bp, Artificial Sequence; identical to SEQ ID NO: 2190
  Synthetic

SEQ ID NO: 2538 - DNA, 36 bp, Artificial Sequence; identical to SEQ ID NO: 2190
  Synthetic

SEQ ID NO: 2539 - DNA, 36 bp, Artificial Sequence; identical to SEQ ID NO: 2190
  Synthetic

SEQ ID NO: 2540 - DNA, 36 bp, Artificial Sequence; identical to SEQ ID NO: 2190
  Synthetic

SEQ ID NO: 2541 - DNA, 36 bp, Artificial Sequence; identical to SEQ ID NO: 2190
  Synthetic

SEQ ID NO: 2542 - DNA, 36 bp, Artificial Sequence; identical to SEQ ID NO: 2190
  Synthetic

SEQ ID NO: 2543 - DNA, 36 bp, Artificial Sequence; identical to SEQ ID NO: 2190
  Synthetic

SEQ ID NO: 2544 - DNA, 36 bp, Artificial Sequence; identical to SEQ ID NO: 2190
  Synthetic

SEQ ID NO: 2545 - DNA, 36 bp, Artificial Sequence; identical to SEQ ID NO: 2190
  Synthetic

SEQ ID NO: 2546 - DNA, 36 bp, Artificial Sequence; identical to SEQ ID NO: 2190
  Synthetic

SEQ ID NO: 2547 - DNA, 36 bp, Artificial Sequence; identical to SEQ ID NO: 2190
  Synthetic

SEQ ID NO: 2548 - DNA, 36 bp, Artificial Sequence; identical to SEQ ID NO: 2190
  Synthetic

SEQ ID NO: 2549 - DNA, 36 bp, Artificial Sequence; identical to SEQ ID NO: 2190
  Synthetic

SEQ ID NO: 2550 - DNA, 36 bp, Artificial Sequence; identical to SEQ ID NO: 2190
  Synthetic

SEQ ID NO: 2551 - DNA, 36 bp, Artificial Sequence; identical to SEQ ID NO: 2190
  Synthetic

SEQ ID NO: 2552 - DNA, 36 bp, Artificial Sequence; identical to SEQ ID NO: 2190
  Synthetic

SEQ ID NO: 2553 - DNA, 36 bp, Artificial Sequence; identical to SEQ ID NO: 2190
  Synthetic

SEQ ID NO: 2554 - DNA, 36 bp, Artificial Sequence; identical to SEQ ID NO: 2190
  Synthetic

SEQ ID NO: 2555 - DNA, 36 bp, Artificial Sequence; identical to SEQ ID NO: 2190
  Synthetic

SEQ ID NO: 2556 - DNA, 36 bp, Artificial Sequence; identical to SEQ ID NO: 2190
  Synthetic

SEQ ID NO: 2557 - DNA, 36 bp, Artificial Sequence; identical to SEQ ID NO: 2190
  Synthetic

SEQ ID NO: 2558 - DNA, 36 bp, Artificial Sequence; identical to SEQ ID NO: 2190
  Synthetic

SEQ ID NO: 2559 - DNA, 36 bp, Artificial Sequence; identical to SEQ ID NO: 2190
  Synthetic

SEQ ID NO: 2560 - DNA, 36 bp, Artificial Sequence; identical to SEQ ID NO: 2190
  Synthetic

SEQ ID NO: 2561 - DNA, 36 bp, Artificial Sequence; identical to SEQ ID NO: 2190
  Synthetic

SEQ ID NO: 2562 - DNA, 36 bp, Artificial Sequence; identical to SEQ ID NO: 2190
  Synthetic

SEQ ID NO: 2563 - DNA, 36 bp, Artificial Sequence; identical to SEQ ID NO: 2190
  Synthetic

SEQ ID NO: 2564 - DNA, 36 bp, Artificial Sequence; identical to SEQ ID NO: 2190
  Synthetic

SEQ ID NO: 2565 - DNA, 36 bp, Artificial Sequence; identical to SEQ ID NO: 2190
  Synthetic

SEQ ID NO: 2566 - DNA, 36 bp, Artificial Sequence; identical to SEQ ID NO: 2190
  Synthetic

SEQ ID NO: 2567 - DNA, 36 bp, Artificial Sequence; identical to SEQ ID NO: 2190
  Synthetic

SEQ ID NO: 2568 - DNA, 36 bp, Artificial Sequence; identical to SEQ ID NO: 2190
  Synthetic

SEQ ID NO: 2569 - DNA, 36 bp, Artificial Sequence; identical to SEQ ID NO: 2190
  Synthetic

SEQ ID NO: 2570 - DNA, 36 bp, Artificial Sequence; identical to SEQ ID NO: 2190
  Synthetic

SEQ ID NO: 2571 - DNA, 36 bp, Artificial Sequence; identical to SEQ ID NO: 2190
  Synthetic

SEQ ID NO: 2572 - DNA, 36 bp, Artificial Sequence; identical to SEQ ID NO: 2190
  Synthetic

SEQ ID NO: 2573 - DNA, 36 bp, Artificial Sequence; identical to SEQ ID NO: 2190
  Synthetic

SEQ ID NO: 2574 - DNA, 36 bp, Artificial Sequence; identical to SEQ ID NO: 2190
  Synthetic

SEQ ID NO: 2575 - DNA, 36 bp, Artificial Sequence; identical to SEQ ID NO: 2190
  Synthetic

SEQ ID NO: 2576 - DNA, 36 bp, Artificial Sequence; identical to SEQ ID NO: 2190
  Synthetic

SEQ ID NO: 2577 - DNA, 36 bp, Artificial Sequence; identical to SEQ ID NO: 2190
  Synthetic

SEQ ID NO: 2578 - DNA, 36 bp, Artificial Sequence; identical to SEQ ID NO: 2190
  Synthetic

SEQ ID NO: 2579 - DNA, 36 bp, Artificial Sequence; identical to SEQ ID NO: 2190
  Synthetic

SEQ ID NO: 2580 - DNA, 36 bp, Artificial Sequence; identical to SEQ ID NO: 2190
  Synthetic

SEQ ID NO: 2581 - DNA, 36 bp, Artificial Sequence; identical to SEQ ID NO: 2190
  Synthetic

SEQ ID NO: 2582 - DNA, 36 bp, Artificial Sequence; identical to SEQ ID NO: 2190
  Synthetic

SEQ ID NO: 2583 - DNA, 36 bp, Artificial Sequence; identical to SEQ ID NO: 2190
  Synthetic

SEQ ID NO: 2584 - DNA, 36 bp, Artificial Sequence; identical to SEQ ID NO: 2190
  Synthetic

SEQ ID NO: 2585 - DNA, 36 bp, Artificial Sequence; identical to SEQ ID NO: 2190
  Synthetic

SEQ ID NO: 2586 - DNA, 36 bp, Artificial Sequence; identical to SEQ ID NO: 2190
  Synthetic

SEQ ID NO: 2587 - DNA, 36 bp, Artificial Sequence; identical to SEQ ID NO: 2190
  Synthetic

SEQ ID NO: 2588 - DNA, 36 bp, Artificial Sequence; identical to SEQ ID NO: 2190
  Synthetic

SEQ ID NO: 2589 - DNA, 36 bp, Artificial Sequence; identical to SEQ ID NO: 2190
  Synthetic

SEQ ID NO: 2590 - DNA, 36 bp, Artificial Sequence; identical to SEQ ID NO: 2190
  Synthetic

SEQ ID NO: 2591 - DNA, 36 bp, Artificial Sequence; identical to SEQ ID NO: 2190
  Synthetic

SEQ ID NO: 2592 - DNA, 36 bp, Artificial Sequence; identical to SEQ ID NO: 2190
  Synthetic

SEQ ID NO: 2593 - DNA, 36 bp, Artificial Sequence; identical to SEQ ID NO: 2190
  Synthetic

SEQ ID NO: 2594 - DNA, 36 bp, Artificial Sequence; identical to SEQ ID NO: 2190
  Synthetic

SEQ ID NO: 2595 - DNA, 36 bp, Artificial Sequence; identical to SEQ ID NO: 2190
  Synthetic

SEQ ID NO: 2596 - DNA, 36 bp, Artificial Sequence; identical to SEQ ID NO: 2190
  Synthetic

SEQ ID NO: 2597 - DNA, 36 bp, Artificial Sequence; identical to SEQ ID NO: 2190
  Synthetic

SEQ ID NO: 2598 - DNA, 36 bp, Artificial Sequence; identical to SEQ ID NO: 2190
  Synthetic

SEQ ID NO: 2599 - DNA, 36 bp, Artificial Sequence; identical to SEQ ID NO: 2190
  Synthetic

SEQ ID NO: 2600 - DNA, 36 bp, Artificial Sequence
  Synthetic
gttggaactgctctcattttggagggtaatcacaac

SEQ ID NO: 2601 - DNA, 36 bp, Artificial Sequence; identical to SEQ ID NO: 2600
  Synthetic

SEQ ID NO: 2602 - DNA, 36 bp, Artificial Sequence; identical to SEQ ID NO: 2600
  Synthetic

SEQ ID NO: 2603 - DNA, 36 bp, Artificial Sequence; identical to SEQ ID NO: 2600
  Synthetic

SEQ ID NO: 2604 - DNA, 36 bp, Artificial Sequence; identical to SEQ ID NO: 2600
  Synthetic

SEQ ID NO: 2605 - DNA, 36 bp, Artificial Sequence; identical to SEQ ID NO: 2600
  Synthetic

SEQ ID NO: 2606 - DNA, 36 bp, Artificial Sequence; identical to SEQ ID NO: 2600
  Synthetic

SEQ ID NO: 2607 - DNA, 36 bp, Artificial Sequence; identical to SEQ ID NO: 2600
  Synthetic

SEQ ID NO: 2608 - DNA, 36 bp, Artificial Sequence; identical to SEQ ID NO: 2600
  Synthetic

SEQ ID NO: 2609 - DNA, 36 bp, Artificial Sequence; identical to SEQ ID NO: 2600
  Synthetic

SEQ ID NO: 2610 - DNA, 36 bp, Artificial Sequence; identical to SEQ ID NO: 2600
  Synthetic

SEQ ID NO: 2611 - DNA, 36 bp, Artificial Sequence; identical to SEQ ID NO: 2600
  Synthetic

SEQ ID NO: 2612 - DNA, 36 bp, Artificial Sequence; identical to SEQ ID NO: 2600
  Synthetic

SEQ ID NO: 2613 - DNA, 36 bp, Artificial Sequence; identical to SEQ ID NO: 2600
  Synthetic

SEQ ID NO: 2614 - DNA, 36 bp, Artificial Sequence; identical to SEQ ID NO: 2600
  Synthetic

SEQ ID NO: 2615 - DNA, 36 bp, Artificial Sequence; identical to SEQ ID NO: 2600
  Synthetic

SEQ ID NO: 2616 - DNA, 36 bp, Artificial Sequence; identical to SEQ ID NO: 2600
  Synthetic

SEQ ID NO: 2617 - DNA, 36 bp, Artificial Sequence; identical to SEQ ID NO: 2600
  Synthetic

SEQ ID NO: 2618 - DNA, 36 bp, Artificial Sequence; identical to SEQ ID NO: 2600
  Synthetic

SEQ ID NO: 2619 - DNA, 36 bp, Artificial Sequence; identical to SEQ ID NO: 2600
  Synthetic

SEQ ID NO: 2620 - DNA, 36 bp, Artificial Sequence; identical to SEQ ID NO: 2600
  Synthetic

SEQ ID NO: 2621 - DNA, 36 bp, Artificial Sequence; identical to SEQ ID NO: 2600
  Synthetic

SEQ ID NO: 2622 - DNA, 36 bp, Artificial Sequence; identical to SEQ ID NO: 2600
  Synthetic

SEQ ID NO: 2623 - DNA, 36 bp, Artificial Sequence; identical to SEQ ID NO: 2600
  Synthetic

SEQ ID NO: 2624 - DNA, 36 bp, Artificial Sequence; identical to SEQ ID NO: 2600
  Synthetic

SEQ ID NO: 2625 - DNA, 36 bp, Artificial Sequence; identical to SEQ ID NO: 2600
  Synthetic

SEQ ID NO: 2626 - DNA, 36 bp, Artificial Sequence; identical to SEQ ID NO: 2600
  Synthetic

SEQ ID NO: 2627 - DNA, 36 bp, Artificial Sequence; identical to SEQ ID NO: 2600
  Synthetic

SEQ ID NO: 2628 - DNA, 36 bp, Artificial Sequence; identical to SEQ ID NO: 2600
  Synthetic

SEQ ID NO: 2629 - DNA, 36 bp, Artificial Sequence; identical to SEQ ID NO: 2600
  Synthetic

SEQ ID NO: 2630 - DNA, 36 bp, Artificial Sequence; identical to SEQ ID NO: 2600
  Synthetic

SEQ ID NO: 2631 - DNA, 36 bp, Artificial Sequence; identical to SEQ ID NO: 2600
  Synthetic

SEQ ID NO: 2632 - DNA, 36 bp, Artificial Sequence; identical to SEQ ID NO: 2600
  Synthetic

SEQ ID NO: 2633 - DNA, 36 bp, Artificial Sequence; identical to SEQ ID NO: 2600
  Synthetic

SEQ ID NO: 2634 - DNA, 36 bp, Artificial Sequence; identical to SEQ ID NO: 2600
  Synthetic

SEQ ID NO: 2635 - DNA, 36 bp, Artificial Sequence; identical to SEQ ID NO: 2600
  Synthetic

SEQ ID NO: 2636 - DNA, 36 bp, Artificial Sequence; identical to SEQ ID NO: 2600
  Synthetic

SEQ ID NO: 2637 - DNA, 36 bp, Artificial Sequence; identical to SEQ ID NO: 2600
  Synthetic

SEQ ID NO: 2638 - DNA, 36 bp, Artificial Sequence; identical to SEQ ID NO: 2600
  Synthetic

SEQ ID NO: 2639 - DNA, 36 bp, Artificial Sequence; identical to SEQ ID NO: 2600
  Synthetic

SEQ ID NO: 2640 - DNA, 36 bp, Artificial Sequence; identical to SEQ ID NO: 2600
  Synthetic

SEQ ID NO: 2641 - DNA, 36 bp, Artificial Sequence; identical to SEQ ID NO: 2600
  Synthetic

SEQ ID NO: 2642 - DNA, 36 bp, Artificial Sequence; identical to SEQ ID NO: 2600
  Synthetic

SEQ ID NO: 2643 - DNA, 36 bp, Artificial Sequence; identical to SEQ ID NO: 2600
  Synthetic

SEQ ID NO: 2644 - DNA, 36 bp, Artificial Sequence; identical to SEQ ID NO: 2600
  Synthetic

SEQ ID NO: 2645 - DNA, 36 bp, Artificial Sequence; identical to SEQ ID NO: 2600
  Synthetic

SEQ ID NO: 2646 - DNA, 36 bp, Artificial Sequence; identical to SEQ ID NO: 2600
  Synthetic

SEQ ID NO: 2647 - DNA, 36 bp, Artificial Sequence; identical to SEQ ID NO: 2600
  Synthetic

SEQ ID NO: 2648 - DNA, 36 bp, Artificial Sequence; identical to SEQ ID NO: 2600
  Synthetic

SEQ ID NO: 2649 - DNA, 36 bp, Artificial Sequence; identical to SEQ ID NO: 2600
  Synthetic

SEQ ID NO: 2650 - DNA, 36 bp, Artificial Sequence; identical to SEQ ID NO: 2600
  Synthetic

SEQ ID NO: 2651 - DNA, 36 bp, Artificial Sequence; identical to SEQ ID NO: 2600
  Synthetic

SEQ ID NO: 2652 - DNA, 36 bp, Artificial Sequence; identical to SEQ ID NO: 2600
  Synthetic

SEQ ID NO: 2653 - DNA, 36 bp, Artificial Sequence; identical to SEQ ID NO: 2600
  Synthetic

SEQ ID NO: 2654 - DNA, 36 bp, Artificial Sequence; identical to SEQ ID NO: 2600
  Synthetic

SEQ ID NO: 2655 - DNA, 36 bp, Artificial Sequence; identical to SEQ ID NO: 2600
  Synthetic

SEQ ID NO: 2656 - DNA, 36 bp, Artificial Sequence; identical to SEQ ID NO: 2600
  Synthetic

SEQ ID NO: 2657 - DNA, 36 bp, Artificial Sequence; identical to SEQ ID NO: 2600
  Synthetic

SEQ ID NO: 2658 - DNA, 36 bp, Artificial Sequence; identical to SEQ ID NO: 2600
  Synthetic

SEQ ID NO: 2659 - DNA, 36 bp, Artificial Sequence; identical to SEQ ID NO: 2600
  Synthetic

SEQ ID NO: 2660 - DNA, 36 bp, Artificial Sequence; identical to SEQ ID NO: 2600
  Synthetic

SEQ ID NO: 2661 - DNA, 36 bp, Artificial Sequence; identical to SEQ ID NO: 2600
  Synthetic

SEQ ID NO: 2662 - DNA, 36 bp, Artificial Sequence; identical to SEQ ID NO: 2600
  Synthetic

SEQ ID NO: 2663 - DNA, 36 bp, Artificial Sequence; identical to SEQ ID NO: 2600
  Synthetic

SEQ ID NO: 2664 - DNA, 36 bp, Artificial Sequence; identical to SEQ ID NO: 2600
  Synthetic

SEQ ID NO: 2665 - DNA, 36 bp, Artificial Sequence; identical to SEQ ID NO: 2600
  Synthetic

SEQ ID NO: 2666 - DNA, 36 bp, Artificial Sequence; identical to SEQ ID NO: 2600
  Synthetic

SEQ ID NO: 2667 - DNA, 36 bp, Artificial Sequence; identical to SEQ ID NO: 2600
  Synthetic

SEQ ID NO: 2668 - DNA, 36 bp, Artificial Sequence; identical to SEQ ID NO: 2600
  Synthetic

SEQ ID NO: 2669 - DNA, 36 bp, Artificial Sequence; identical to SEQ ID NO: 2600
  Synthetic

SEQ ID NO: 2670 - DNA, 36 bp, Artificial Sequence; identical to SEQ ID NO: 2600
  Synthetic

SEQ ID NO: 2671 - DNA, 36 bp, Artificial Sequence; identical to SEQ ID NO: 2600
  Synthetic

SEQ ID NO: 2672 - DNA, 36 bp, Artificial Sequence; identical to SEQ ID NO: 2600
  Synthetic

SEQ ID NO: 2673 - DNA, 36 bp, Artificial Sequence; identical to SEQ ID NO: 2600
  Synthetic

SEQ ID NO: 2674 - DNA, 36 bp, Artificial Sequence; identical to SEQ ID NO: 2600
  Synthetic

SEQ ID NO: 2675 - DNA, 36 bp, Artificial Sequence; identical to SEQ ID NO: 2600
  Synthetic

SEQ ID NO: 2676 - DNA, 36 bp, Artificial Sequence; identical to SEQ ID NO: 2600
  Synthetic

SEQ ID NO: 2677 - DNA, 36 bp, Artificial Sequence; identical to SEQ ID NO: 2600
  Synthetic

SEQ ID NO: 2678 - DNA, 36 bp, Artificial Sequence; identical to SEQ ID NO: 2600
  Synthetic

SEQ ID NO: 2679 - DNA, 36 bp, Artificial Sequence; identical to SEQ ID NO: 2600
  Synthetic

SEQ ID NO: 2680 - DNA, 36 bp, Artificial Sequence; identical to SEQ ID NO: 2600
  Synthetic

SEQ ID NO: 2681 - DNA, 36 bp, Artificial Sequence; identical to SEQ ID NO: 2600
  Synthetic

SEQ ID NO: 2682 - DNA, 36 bp, Artificial Sequence; identical to SEQ ID NO: 2600
  Synthetic

SEQ ID NO: 2683 - DNA, 36 bp, Artificial Sequence; identical to SEQ ID NO: 2600
  Synthetic

SEQ ID NO: 2684 - DNA, 36 bp, Artificial Sequence; identical to SEQ ID NO: 2600
  Synthetic

SEQ ID NO: 2685 - DNA, 36 bp, Artificial Sequence; identical to SEQ ID NO: 2600
  Synthetic

SEQ ID NO: 2686 - DNA, 36 bp, Artificial Sequence; identical to SEQ ID NO: 2600
  Synthetic

SEQ ID NO: 2687 - DNA, 36 bp, Artificial Sequence; identical to SEQ ID NO: 2600
  Synthetic

SEQ ID NO: 2688 - DNA, 36 bp, Artificial Sequence; identical to SEQ ID NO: 2600
  Synthetic

SEQ ID NO: 2689 - DNA, 36 bp, Artificial Sequence; identical to SEQ ID NO: 2600
  Synthetic

SEQ ID NO: 2690 - DNA, 36 bp, Artificial Sequence; identical to SEQ ID NO: 2600
  Synthetic

SEQ ID NO: 2691 - DNA, 36 bp, Artificial Sequence; identical to SEQ ID NO: 2600
  Synthetic

SEQ ID NO: 2692 - DNA, 36 bp, Artificial Sequence; identical to SEQ ID NO: 2600
  Synthetic

SEQ ID NO: 2693 - DNA, 36 bp, Artificial Sequence; identical to SEQ ID NO: 2600
  Synthetic

SEQ ID NO: 2694 - DNA, 36 bp, Artificial Sequence; identical to SEQ ID NO: 2600
  Synthetic

SEQ ID NO: 2695 - DNA, 36 bp, Artificial Sequence; identical to SEQ ID NO: 2600
  Synthetic

SEQ ID NO: 2696 - DNA, 36 bp, Artificial Sequence; identical to SEQ ID NO: 2600
  Synthetic

SEQ ID NO: 2697 - DNA, 36 bp, Artificial Sequence; identical to SEQ ID NO: 2600
  Synthetic

SEQ ID NO: 2698 - DNA, 36 bp, Artificial Sequence; identical to SEQ ID NO: 2600
  Synthetic

SEQ ID NO: 2699 - DNA, 36 bp, Artificial Sequence; identical to SEQ ID NO: 2600
  Synthetic

SEQ ID NO: 2700 - DNA, 36 bp, Artificial Sequence; identical to SEQ ID NO: 2600
  Synthetic

SEQ ID NO: 2701 - DNA, 36 bp, Artificial Sequence; identical to SEQ ID NO: 2600
  Synthetic

SEQ ID NO: 2702 - DNA, 36 bp, Artificial Sequence; identical to SEQ ID NO: 2600
  Synthetic

SEQ ID NO: 2703 - DNA, 36 bp, Artificial Sequence; identical to SEQ ID NO: 2600
  Synthetic

SEQ ID NO: 2704 - DNA, 36 bp, Artificial Sequence; identical to SEQ ID NO: 2600
  Synthetic

SEQ ID NO: 2705 - DNA, 36 bp, Artificial Sequence; identical to SEQ ID NO: 2600
  Synthetic

SEQ ID NO: 2706 - DNA, 36 bp, Artificial Sequence; identical to SEQ ID NO: 2600
  Synthetic

SEQ ID NO: 2707 - DNA, 36 bp, Artificial Sequence; identical to SEQ ID NO: 2600
  Synthetic

SEQ ID NO: 2708 - DNA, 36 bp, Artificial Sequence; identical to SEQ ID NO: 2600
  Synthetic

SEQ ID NO: 2709 - DNA, 36 bp, Artificial Sequence; identical to SEQ ID NO: 2600
  Synthetic

SEQ ID NO: 2710 - DNA, 36 bp, Artificial Sequence; identical to SEQ ID NO: 2600
  Synthetic

SEQ ID NO: 2711 - DNA, 36 bp, Artificial Sequence; identical to SEQ ID NO: 2600
  Synthetic

SEQ ID NO: 2712 - DNA, 36 bp, Artificial Sequence; identical to SEQ ID NO: 2600
  Synthetic

SEQ ID NO: 2713 - DNA, 36 bp, Artificial Sequence; identical to SEQ ID NO: 2600
  Synthetic

SEQ ID NO: 2714 - DNA, 36 bp, Artificial Sequence; identical to SEQ ID NO: 2600
  Synthetic

SEQ ID NO: 2715 - DNA, 36 bp, Artificial Sequence; identical to SEQ ID NO: 2600
  Synthetic

SEQ ID NO: 2716 - DNA, 36 bp, Artificial Sequence; identical to SEQ ID NO: 2600
  Synthetic

SEQ ID NO: 2717 - DNA, 36 bp, Artificial Sequence; identical to SEQ ID NO: 2600
  Synthetic

SEQ ID NO: 2718 - DNA, 36 bp, Artificial Sequence; identical to SEQ ID NO: 2600
  Synthetic

SEQ ID NO: 2719 - DNA, 36 bp, Artificial Sequence; identical to SEQ ID NO: 2600
  Synthetic

SEQ ID NO: 2720 - DNA, 36 bp, Artificial Sequence; identical to SEQ ID NO: 2600
  Synthetic

SEQ ID NO: 2721 - DNA, 36 bp, Artificial Sequence; identical to SEQ ID NO: 2600
  Synthetic

SEQ ID NO: 2722 - DNA, 36 bp, Artificial Sequence; identical to SEQ ID NO: 2600
  Synthetic

SEQ ID NO: 2723 - DNA, 36 bp, Artificial Sequence; identical to SEQ ID NO: 2600
  Synthetic

SEQ ID NO: 2724 - DNA, 36 bp, Artificial Sequence; identical to SEQ ID NO: 2600
  Synthetic

SEQ ID NO: 2725 - DNA, 36 bp, Artificial Sequence; identical to SEQ ID NO: 2600
  Synthetic

SEQ ID NO: 2726 - DNA, 36 bp, Artificial Sequence; identical to SEQ ID NO: 2600
  Synthetic

SEQ ID NO: 2727 - DNA, 36 bp, Artificial Sequence; identical to SEQ ID NO: 2600
  Synthetic

SEQ ID NO: 2728 - DNA, 36 bp, Artificial Sequence; identical to SEQ ID NO: 2600
  Synthetic

SEQ ID NO: 2729 - DNA, 36 bp, Artificial Sequence; identical to SEQ ID NO: 2600
  Synthetic

SEQ ID NO: 2730 - DNA, 36 bp, Artificial Sequence; identical to SEQ ID NO: 2600
  Synthetic

SEQ ID NO: 2731 - DNA, 36 bp, Artificial Sequence; identical to SEQ ID NO: 2600
  Synthetic

SEQ ID NO: 2732 - DNA, 36 bp, Artificial Sequence; identical to SEQ ID NO: 2600
  Synthetic

SEQ ID NO: 2733 - DNA, 36 bp, Artificial Sequence; identical to SEQ ID NO: 2600
  Synthetic

SEQ ID NO: 2734 - DNA, 36 bp, Artificial Sequence; identical to SEQ ID NO: 2600
  Synthetic

SEQ ID NO: 2735 - DNA, 36 bp, Artificial Sequence; identical to SEQ ID NO: 2600
  Synthetic

SEQ ID NO: 2736 - DNA, 36 bp, Artificial Sequence; identical to SEQ ID NO: 2600
  Synthetic

SEQ ID NO: 2737 - DNA, 36 bp, Artificial Sequence; identical to SEQ ID NO: 2600
  Synthetic

SEQ ID NO: 2738 - DNA, 36 bp, Artificial Sequence; identical to SEQ ID NO: 2600
  Synthetic

SEQ ID NO: 2739 - DNA, 36 bp, Artificial Sequence; identical to SEQ ID NO: 2600
  Synthetic

SEQ ID NO: 2740 - DNA, 36 bp, Artificial Sequence; identical to SEQ ID NO: 2600
  Synthetic

SEQ ID NO: 2741 - DNA, 36 bp, Artificial Sequence; identical to SEQ ID NO: 2600
  Synthetic

SEQ ID NO: 2742 - DNA, 36 bp, Artificial Sequence; identical to SEQ ID NO: 2600
  Synthetic

SEQ ID NO: 2743 - DNA, 36 bp, Artificial Sequence; identical to SEQ ID NO: 2600
  Synthetic

SEQ ID NO: 2744 - DNA, 36 bp, Artificial Sequence; identical to SEQ ID NO: 2600
  Synthetic

SEQ ID NO: 2745 - DNA, 36 bp, Artificial Sequence; identical to SEQ ID NO: 2600
  Synthetic

SEQ ID NO: 2746 - DNA, 36 bp, Artificial Sequence; identical to SEQ ID NO: 2600
  Synthetic

SEQ ID NO: 2747 - DNA, 36 bp, Artificial Sequence; identical to SEQ ID NO: 2600
  Synthetic

SEQ ID NO: 2748 - DNA, 36 bp, Artificial Sequence; identical to SEQ ID NO: 2600
  Synthetic

SEQ ID NO: 2749 - DNA, 36 bp, Artificial Sequence; identical to SEQ ID NO: 2600
  Synthetic

SEQ ID NO: 2750 - DNA, 36 bp, Artificial Sequence; identical to SEQ ID NO: 2600
  Synthetic

SEQ ID NO: 2751 - DNA, 36 bp, Artificial Sequence; identical to SEQ ID NO: 2600
  Synthetic

SEQ ID NO: 2752 - DNA, 36 bp, Artificial Sequence; identical to SEQ ID NO: 2600
  Synthetic

SEQ ID NO: 2753 - DNA, 36 bp, Artificial Sequence; identical to SEQ ID NO: 2600
  Synthetic

SEQ ID NO: 2754 - DNA, 36 bp, Artificial Sequence; identical to SEQ ID NO: 2600
  Synthetic

SEQ ID NO: 2755 - DNA, 36 bp, Artificial Sequence; identical to SEQ ID NO: 2600
  Synthetic

SEQ ID NO: 2756 - DNA, 36 bp, Artificial Sequence; identical to SEQ ID NO: 2600
  Synthetic

SEQ ID NO: 2757 - DNA, 36 bp, Artificial Sequence; identical to SEQ ID NO: 2600
  Synthetic

SEQ ID NO: 2758 - DNA, 36 bp, Artificial Sequence; identical to SEQ ID NO: 2600
  Synthetic

SEQ ID NO: 2759 - DNA, 36 bp, Artificial Sequence; identical to SEQ ID NO: 2600
  Synthetic

SEQ ID NO: 2760 - DNA, 36 bp, Artificial Sequence; identical to SEQ ID NO: 2600
  Synthetic

SEQ ID NO: 2761 - DNA, 36 bp, Artificial Sequence; identical to SEQ ID NO: 2600
  Synthetic

SEQ ID NO: 2762 - DNA, 36 bp, Artificial Sequence; identical to SEQ ID NO: 2600
  Synthetic

SEQ ID NO: 2763 - DNA, 36 bp, Artificial Sequence; identical to SEQ ID NO: 2600
  Synthetic

SEQ ID NO: 2764 - DNA, 36 bp, Artificial Sequence; identical to SEQ ID NO: 2600
  Synthetic

SEQ ID NO: 2765 - DNA, 36 bp, Artificial Sequence; identical to SEQ ID NO: 2600
  Synthetic

SEQ ID NO: 2766 - DNA, 36 bp, Artificial Sequence; identical to SEQ ID NO: 2600
  Synthetic

SEQ ID NO: 2767 - DNA, 36 bp, Artificial Sequence; identical to SEQ ID NO: 2600
  Synthetic

SEQ ID NO: 2768 - DNA, 36 bp, Artificial Sequence; identical to SEQ ID NO: 2600
  Synthetic

SEQ ID NO: 2769 - DNA, 36 bp, Artificial Sequence; identical to SEQ ID NO: 2600
  Synthetic

SEQ ID NO: 2770 - DNA, 36 bp, Artificial Sequence; identical to SEQ ID NO: 2600
  Synthetic

SEQ ID NO: 2771 - DNA, 36 bp, Artificial Sequence; identical to SEQ ID NO: 2600
  Synthetic

SEQ ID NO: 2772 - DNA, 36 bp, Artificial Sequence; identical to SEQ ID NO: 2600
  Synthetic

SEQ ID NO: 2773 - DNA, 36 bp, Artificial Sequence; identical to SEQ ID NO: 2600
  Synthetic

SEQ ID NO: 2774 - DNA, 36 bp, Artificial Sequence; identical to SEQ ID NO: 2600
  Synthetic

SEQ ID NO: 2775 - DNA, 36 bp, Artificial Sequence; identical to SEQ ID NO: 2600
  Synthetic

SEQ ID NO: 2776 - DNA, 36 bp, Artificial Sequence; identical to SEQ ID NO: 2600
  Synthetic

SEQ ID NO: 2777 - DNA, 36 bp, Artificial Sequence; identical to SEQ ID NO: 2600
  Synthetic

SEQ ID NO: 2778 - DNA, 36 bp, Artificial Sequence; identical to SEQ ID NO: 2600
  Synthetic

SEQ ID NO: 2779 - DNA, 36 bp, Artificial Sequence; identical to SEQ ID NO: 2600
  Synthetic

SEQ ID NO: 2780 - DNA, 36 bp, Artificial Sequence; identical to SEQ ID NO: 2600
  Synthetic

SEQ ID NO: 2781 - DNA, 36 bp, Artificial Sequence; identical to SEQ ID NO: 2600
  Synthetic

SEQ ID NO: 2782 - DNA, 36 bp, Artificial Sequence; identical to SEQ ID NO: 2600
  Synthetic

SEQ ID NO: 2783 - DNA, 36 bp, Artificial Sequence; identical to SEQ ID NO: 2600
  Synthetic

SEQ ID NO: 2784 - DNA, 36 bp, Artificial Sequence; identical to SEQ ID NO: 2600
  Synthetic

SEQ ID NO: 2785 - DNA, 36 bp, Artificial Sequence; identical to SEQ ID NO: 2600
  Synthetic

SEQ ID NO: 2786 - DNA, 36 bp, Artificial Sequence; identical to SEQ ID NO: 2600
  Synthetic

SEQ ID NO: 2787 - DNA, 36 bp, Artificial Sequence; identical to SEQ ID NO: 2600
  Synthetic

SEQ ID NO: 2788 - DNA, 36 bp, Artificial Sequence; identical to SEQ ID NO: 2600
  Synthetic

SEQ ID NO: 2789 - DNA, 36 bp, Artificial Sequence; identical to SEQ ID NO: 2600
  Synthetic

SEQ ID NO: 2790 - DNA, 36 bp, Artificial Sequence; identical to SEQ ID NO: 2600
  Synthetic

SEQ ID NO: 2791 - DNA, 36 bp, Artificial Sequence; identical to SEQ ID NO: 2600
  Synthetic

SEQ ID NO: 2792 - DNA, 36 bp, Artificial Sequence; identical to SEQ ID NO: 2600
  Synthetic

SEQ ID NO: 2793 - DNA, 36 bp, Artificial Sequence; identical to SEQ ID NO: 2600
  Synthetic

SEQ ID NO: 2794 - DNA, 36 bp, Artificial Sequence; identical to SEQ ID NO: 2600
  Synthetic

SEQ ID NO: 2795 - DNA, 36 bp, Artificial Sequence; identical to SEQ ID NO: 2600
  Synthetic

SEQ ID NO: 2796 - DNA, 36 bp, Artificial Sequence; identical to SEQ ID NO: 2600
  Synthetic

SEQ ID NO: 2797 - DNA, 36 bp, Artificial Sequence; identical to SEQ ID NO: 2600
  Synthetic

SEQ ID NO: 2798 - DNA, 36 bp, Artificial Sequence; identical to SEQ ID NO: 2600
  Synthetic

SEQ ID NO: 2799 - DNA, 36 bp, Artificial Sequence; identical to SEQ ID NO: 2600
  Synthetic

SEQ ID NO: 2800 - DNA, 36 bp, Artificial Sequence; identical to SEQ ID NO: 2600
  Synthetic

SEQ ID NO: 2801 - DNA, 36 bp, Artificial Sequence; identical to SEQ ID NO: 2600
  Synthetic

SEQ ID NO: 2802 - DNA, 36 bp, Artificial Sequence; identical to SEQ ID NO: 2600
  Synthetic

SEQ ID NO: 2803 - DNA, 36 bp, Artificial Sequence; identical to SEQ ID NO: 2600
  Synthetic

SEQ ID NO: 2804 - DNA, 36 bp, Artificial Sequence; identical to SEQ ID NO: 2600
  Synthetic

SEQ ID NO: 2805 - DNA, 36 bp, Artificial Sequence; identical to SEQ ID NO: 2600
  Synthetic

SEQ ID NO: 2806 - DNA, 36 bp, Artificial Sequence; identical to SEQ ID NO: 2600
  Synthetic

SEQ ID NO: 2807 - DNA, 36 bp, Artificial Sequence; identical to SEQ ID NO: 2600
  Synthetic

SEQ ID NO: 2808 - DNA, 36 bp, Artificial Sequence; identical to SEQ ID NO: 2600
  Synthetic

SEQ ID NO: 2809 - DNA, 36 bp, Artificial Sequence; identical to SEQ ID NO: 2600
  Synthetic

SEQ ID NO: 2810 - DNA, 36 bp, Artificial Sequence; identical to SEQ ID NO: 2600
  Synthetic

SEQ ID NO: 2811 - DNA, 36 bp, Artificial Sequence; identical to SEQ ID NO: 2600
  Synthetic

SEQ ID NO: 2812 - DNA, 36 bp, Artificial Sequence; identical to SEQ ID NO: 2600
  Synthetic

SEQ ID NO: 2813 - DNA, 36 bp, Artificial Sequence; identical to SEQ ID NO: 2600
  Synthetic

SEQ ID NO: 2814 - DNA, 36 bp, Artificial Sequence; identical to SEQ ID NO: 2600
  Synthetic

SEQ ID NO: 2815 - DNA, 36 bp, Artificial Sequence; identical to SEQ ID NO: 2600
  Synthetic

SEQ ID NO: 2816 - DNA, 36 bp, Artificial Sequence; identical to SEQ ID NO: 2600
  Synthetic

SEQ ID NO: 2817 - DNA, 36 bp, Artificial Sequence; identical to SEQ ID NO: 2600
  Synthetic

SEQ ID NO: 2818 - DNA, 36 bp, Artificial Sequence; identical to SEQ ID NO: 2600
  Synthetic

SEQ ID NO: 2819 - DNA, 36 bp, Artificial Sequence; identical to SEQ ID NO: 2600
  Synthetic

SEQ ID NO: 2820 - DNA, 36 bp, Artificial Sequence; identical to SEQ ID NO: 2600
  Synthetic

SEQ ID NO: 2821 - DNA, 36 bp, Artificial Sequence; identical to SEQ ID NO: 2600
  Synthetic

SEQ ID NO: 2822 - DNA, 36 bp, Artificial Sequence; identical to SEQ ID NO: 2600
  Synthetic

SEQ ID NO: 2823 - DNA, 36 bp, Artificial Sequence; identical to SEQ ID NO: 2600
  Synthetic

SEQ ID NO: 2824 - DNA, 36 bp, Artificial Sequence; identical to SEQ ID NO: 2600
  Synthetic

SEQ ID NO: 2825 - DNA, 36 bp, Artificial Sequence; identical to SEQ ID NO: 2600
  Synthetic

SEQ ID NO: 2826 - DNA, 36 bp, Artificial Sequence; identical to SEQ ID NO: 2600
  Synthetic

SEQ ID NO: 2827 - DNA, 36 bp, Artificial Sequence; identical to SEQ ID NO: 2600
  Synthetic

SEQ ID NO: 2828 - DNA, 36 bp, Artificial Sequence; identical to SEQ ID NO: 2600
  Synthetic

SEQ ID NO: 2829 - DNA, 36 bp, Artificial Sequence; identical to SEQ ID NO: 2600
  Synthetic

SEQ ID NO: 2830 - DNA, 36 bp, Artificial Sequence; identical to SEQ ID NO: 2600
  Synthetic

SEQ ID NO: 2831 - DNA, 36 bp, Artificial Sequence; identical to SEQ ID NO: 2600
  Synthetic

SEQ ID NO: 2832 - DNA, 36 bp, Artificial Sequence; identical to SEQ ID NO: 2600
  Synthetic

SEQ ID NO: 2833 - DNA, 36 bp, Artificial Sequence; identical to SEQ ID NO: 2600
  Synthetic

SEQ ID NO: 2834 - DNA, 36 bp, Artificial Sequence; identical to SEQ ID NO: 2600
  Synthetic

SEQ ID NO: 2835 - DNA, 36 bp, Artificial Sequence; identical to SEQ ID NO: 2600
  Synthetic

SEQ ID NO: 2836 - DNA, 36 bp, Artificial Sequence; identical to SEQ ID NO: 2600
  Synthetic

SEQ ID NO: 2837 - DNA, 36 bp, Artificial Sequence; identical to SEQ ID NO: 2600
  Synthetic

SEQ ID NO: 2838 - DNA, 36 bp, Artificial Sequence; identical to SEQ ID NO: 2600
  Synthetic

SEQ ID NO: 2839 - DNA, 36 bp, Artificial Sequence; identical to SEQ ID NO: 2600
  Synthetic

SEQ ID NO: 2840 - DNA, 36 bp, Artificial Sequence; identical to SEQ ID NO: 2600
  Synthetic

SEQ ID NO: 2841 - DNA, 36 bp, Artificial Sequence; identical to SEQ ID NO: 2600
  Synthetic

SEQ ID NO: 2842 - DNA, 36 bp, Artificial Sequence; identical to SEQ ID NO: 2600
  Synthetic

SEQ ID NO: 2843 - DNA, 36 bp, Artificial Sequence; identical to SEQ ID NO: 2600
  Synthetic

SEQ ID NO: 2844 - DNA, 36 bp, Artificial Sequence; identical to SEQ ID NO: 2600
  Synthetic

SEQ ID NO: 2845 - DNA, 36 bp, Artificial Sequence; identical to SEQ ID NO: 2600
  Synthetic

SEQ ID NO: 2846 - DNA, 36 bp, Artificial Sequence; identical to SEQ ID NO: 2600
  Synthetic

SEQ ID NO: 2847 - DNA, 36 bp, Artificial Sequence; identical to SEQ ID NO: 2600
  Synthetic

SEQ ID NO: 2848 - DNA, 36 bp, Artificial Sequence; identical to SEQ ID NO: 2600
  Synthetic

SEQ ID NO: 2849 - DNA, 36 bp, Artificial Sequence; identical to SEQ ID NO: 2600
  Synthetic

SEQ ID NO: 2850 - DNA, 36 bp, Artificial Sequence; identical to SEQ ID NO: 2600
  Synthetic

SEQ ID NO: 2851 - DNA, 36 bp, Artificial Sequence; identical to SEQ ID NO: 2600
  Synthetic

SEQ ID NO: 2852 - DNA, 36 bp, Artificial Sequence; identical to SEQ ID NO: 2600
  Synthetic

SEQ ID NO: 2853 - DNA, 36 bp, Artificial Sequence; identical to SEQ ID NO: 2600
  Synthetic

SEQ ID NO: 2854 - DNA, 36 bp, Artificial Sequence; identical to SEQ ID NO: 2600
  Synthetic

SEQ ID NO: 2855 - DNA, 36 bp, Artificial Sequence; identical to SEQ ID NO: 2600
  Synthetic

SEQ ID NO: 2856 - DNA, 36 bp, Artificial Sequence; identical to SEQ ID NO: 2600
  Synthetic

SEQ ID NO: 2857 - DNA, 36 bp, Artificial Sequence; identical to SEQ ID NO: 2600
  Synthetic

SEQ ID NO: 2858 - DNA, 36 bp, Artificial Sequence; identical to SEQ ID NO: 2600
  Synthetic

SEQ ID NO: 2859 - DNA, 36 bp, Artificial Sequence; identical to SEQ ID NO: 2600
  Synthetic

SEQ ID NO: 2860 - DNA, 36 bp, Artificial Sequence; identical to SEQ ID NO: 2600
  Synthetic

SEQ ID NO: 2861 - DNA, 36 bp, Artificial Sequence; identical to SEQ ID NO: 2600
  Synthetic

SEQ ID NO: 2862 - DNA, 36 bp, Artificial Sequence; identical to SEQ ID NO: 2600
  Synthetic

SEQ ID NO: 2863 - DNA, 36 bp, Artificial Sequence; identical to SEQ ID NO: 2600
  Synthetic

SEQ ID NO: 2864 - DNA, 36 bp, Artificial Sequence; identical to SEQ ID NO: 2600
  Synthetic

SEQ ID NO: 2865 - DNA, 36 bp, Artificial Sequence; identical to SEQ ID NO: 2600
  Synthetic

SEQ ID NO: 2866 - DNA, 36 bp, Artificial Sequence; identical to SEQ ID NO: 2600
  Synthetic

SEQ ID NO: 2867 - DNA, 36 bp, Artificial Sequence; identical to SEQ ID NO: 2600
  Synthetic

SEQ ID NO: 2868 - DNA, 36 bp, Artificial Sequence; identical to SEQ ID NO: 2600
  Synthetic

SEQ ID NO: 2869 - DNA, 36 bp, Artificial Sequence; identical to SEQ ID NO: 2600
  Synthetic

SEQ ID NO: 2870 - DNA, 36 bp, Artificial Sequence; identical to SEQ ID NO: 2600
  Synthetic

SEQ ID NO: 2871 - DNA, 36 bp, Artificial Sequence; identical to SEQ ID NO: 2600
  Synthetic

SEQ ID NO: 2872 - DNA, 36 bp, Artificial Sequence; identical to SEQ ID NO: 2600
  Synthetic

SEQ ID NO: 2873 - DNA, 36 bp, Artificial Sequence; identical to SEQ ID NO: 2600
  Synthetic

SEQ ID NO: 2874 - DNA, 36 bp, Artificial Sequence; identical to SEQ ID NO: 2600
  Synthetic

SEQ ID NO: 2875 - DNA, 36 bp, Artificial Sequence; identical to SEQ ID NO: 2600
  Synthetic

SEQ ID NO: 2876 - DNA, 36 bp, Artificial Sequence; identical to SEQ ID NO: 2600
  Synthetic

SEQ ID NO: 2877 - DNA, 36 bp, Artificial Sequence; identical to SEQ ID NO: 2600
  Synthetic

SEQ ID NO: 2878 - DNA, 36 bp, Artificial Sequence; identical to SEQ ID NO: 2600
  Synthetic

SEQ ID NO: 2879 - DNA, 36 bp, Artificial Sequence; identical to SEQ ID NO: 2600
  Synthetic

SEQ ID NO: 2880 - DNA, 36 bp, Artificial Sequence; identical to SEQ ID NO: 2600
  Synthetic

SEQ ID NO: 2881 - DNA, 36 bp, Artificial Sequence; identical to SEQ ID NO: 2600
  Synthetic

SEQ ID NO: 2882 - DNA, 36 bp, Artificial Sequence; identical to SEQ ID NO: 2600
  Synthetic

SEQ ID NO: 2883 - DNA, 36 bp, Artificial Sequence; identical to SEQ ID NO: 2600
  Synthetic

SEQ ID NO: 2884 - DNA, 36 bp, Artificial Sequence; identical to SEQ ID NO: 2600
  Synthetic

SEQ ID NO: 2885 - DNA, 36 bp, Artificial Sequence; identical to SEQ ID NO: 2600
  Synthetic

SEQ ID NO: 2886 - DNA, 36 bp, Artificial Sequence; identical to SEQ ID NO: 2600
  Synthetic

SEQ ID NO: 2887 - DNA, 36 bp, Artificial Sequence; identical to SEQ ID NO: 2600
  Synthetic

SEQ ID NO: 2888 - DNA, 36 bp, Artificial Sequence; identical to SEQ ID NO: 2600
  Synthetic

SEQ ID NO: 2889 - DNA, 36 bp, Artificial Sequence; identical to SEQ ID NO: 2600
  Synthetic

SEQ ID NO: 2890 - DNA, 36 bp, Artificial Sequence; identical to SEQ ID NO: 2600
  Synthetic

SEQ ID NO: 2891 - DNA, 36 bp, Artificial Sequence; identical to SEQ ID NO: 2600
  Synthetic

SEQ ID NO: 2892 - DNA, 36 bp, Artificial Sequence; identical to SEQ ID NO: 2600
  Synthetic

SEQ ID NO: 2893 - DNA, 36 bp, Artificial Sequence; identical to SEQ ID NO: 2600
  Synthetic

SEQ ID NO: 2894 - DNA, 36 bp, Artificial Sequence; identical to SEQ ID NO: 2600
  Synthetic

SEQ ID NO: 2895 - DNA, 36 bp, Artificial Sequence; identical to SEQ ID NO: 2600
  Synthetic

SEQ ID NO: 2896 - DNA, 36 bp, Artificial Sequence; identical to SEQ ID NO: 2600
  Synthetic

SEQ ID NO: 2897 - DNA, 36 bp, Artificial Sequence; identical to SEQ ID NO: 2600
  Synthetic

SEQ ID NO: 2898 - DNA, 36 bp, Artificial Sequence; identical to SEQ ID NO: 2600
  Synthetic

SEQ ID NO: 2899 - DNA, 36 bp, Artificial Sequence; identical to SEQ ID NO: 2600
  Synthetic

SEQ ID NO: 2900 - DNA, 36 bp, Artificial Sequence; identical to SEQ ID NO: 2600
  Synthetic

SEQ ID NO: 2901 - DNA, 36 bp, Artificial Sequence; identical to SEQ ID NO: 2600
  Synthetic

SEQ ID NO: 2902 - DNA, 36 bp, Artificial Sequence; identical to SEQ ID NO: 2600
  Synthetic

SEQ ID NO: 2903 - DNA, 36 bp, Artificial Sequence; identical to SEQ ID NO: 2600
  Synthetic

SEQ ID NO: 2904 - DNA, 36 bp, Artificial Sequence; identical to SEQ ID NO: 2600
  Synthetic

SEQ ID NO: 2905 - DNA, 36 bp, Artificial Sequence; identical to SEQ ID NO: 2600
  Synthetic

SEQ ID NO: 2906 - DNA, 36 bp, Artificial Sequence; identical to SEQ ID NO: 2600
  Synthetic

SEQ ID NO: 2907 - DNA, 36 bp, Artificial Sequence; identical to SEQ ID NO: 2600
  Synthetic

SEQ ID NO: 2908 - DNA, 36 bp, Artificial Sequence; identical to SEQ ID NO: 2600
  Synthetic

SEQ ID NO: 2909 - DNA, 36 bp, Artificial Sequence; identical to SEQ ID NO: 2600
  Synthetic

SEQ ID NO: 2910 - DNA, 36 bp, Artificial Sequence; identical to SEQ ID NO: 2600
  Synthetic

SEQ ID NO: 2911 - DNA, 36 bp, Artificial Sequence; identical to SEQ ID NO: 2600
  Synthetic

SEQ ID NO: 2912 - DNA, 36 bp, Artificial Sequence; identical to SEQ ID NO: 2600
  Synthetic

SEQ ID NO: 2913 - DNA, 36 bp, Artificial Sequence; identical to SEQ ID NO: 2600
  Synthetic

SEQ ID NO: 2914 - DNA, 36 bp, Artificial Sequence; identical to SEQ ID NO: 2600
  Synthetic

SEQ ID NO: 2915 - DNA, 36 bp, Artificial Sequence; identical to SEQ ID NO: 2600
  Synthetic

SEQ ID NO: 2916 - DNA, 36 bp, Artificial Sequence; identical to SEQ ID NO: 2600
  Synthetic

SEQ ID NO: 2917 - DNA, 36 bp, Artificial Sequence; identical to SEQ ID NO: 2600
  Synthetic

SEQ ID NO: 2918 - DNA, 36 bp, Artificial Sequence; identical to SEQ ID NO: 2600
  Synthetic

SEQ ID NO: 2919 - DNA, 36 bp, Artificial Sequence; identical to SEQ ID NO: 2600
  Synthetic

SEQ ID NO: 2920 - DNA, 36 bp, Artificial Sequence; identical to SEQ ID NO: 2600
  Synthetic

SEQ ID NO: 2921 - DNA, 36 bp, Artificial Sequence; identical to SEQ ID NO: 2600
  Synthetic

SEQ ID NO: 2922 - DNA, 36 bp, Artificial Sequence; identical to SEQ ID NO: 2600
  Synthetic

SEQ ID NO: 2923 - DNA, 36 bp, Artificial Sequence; identical to SEQ ID NO: 2600
  Synthetic

SEQ ID NO: 2924 - DNA, 36 bp, Artificial Sequence; identical to SEQ ID NO: 2600
  Synthetic

SEQ ID NO: 2925 - DNA, 36 bp, Artificial Sequence; identical to SEQ ID NO: 2600
  Synthetic

SEQ ID NO: 2926 - DNA, 36 bp, Artificial Sequence; identical to SEQ ID NO: 2600
  Synthetic

SEQ ID NO: 2927 - DNA, 36 bp, Artificial Sequence; identical to SEQ ID NO: 2600
  Synthetic

SEQ ID NO: 2928 - DNA, 36 bp, Artificial Sequence; identical to SEQ ID NO: 2600
  Synthetic

SEQ ID NO: 2929 - DNA, 36 bp, Artificial Sequence; identical to SEQ ID NO: 2600
  Synthetic

SEQ ID NO: 2930 - DNA, 36 bp, Artificial Sequence; identical to SEQ ID NO: 2600
  Synthetic

SEQ ID NO: 2931 - DNA, 36 bp, Artificial Sequence; identical to SEQ ID NO: 2600
  Synthetic

SEQ ID NO: 2932 - DNA, 36 bp, Artificial Sequence; identical to SEQ ID NO: 2600
  Synthetic

SEQ ID NO: 2933 - DNA, 36 bp, Artificial Sequence; identical to SEQ ID NO: 2600
  Synthetic

SEQ ID NO: 2934 - DNA, 36 bp, Artificial Sequence; identical to SEQ ID NO: 2600
  Synthetic

SEQ ID NO: 2935 - DNA, 36 bp, Artificial Sequence; identical to SEQ ID NO: 2600
  Synthetic

SEQ ID NO: 2936 - DNA, 36 bp, Artificial Sequence; identical to SEQ ID NO: 2600
  Synthetic

SEQ ID NO: 2937 - DNA, 36 bp, Artificial Sequence; identical to SEQ ID NO: 2600
  Synthetic

SEQ ID NO: 2938 - DNA, 36 bp, Artificial Sequence; identical to SEQ ID NO: 2600
  Synthetic

SEQ ID NO: 2939 - DNA, 36 bp, Artificial Sequence; identical to SEQ ID NO: 2600
  Synthetic

SEQ ID NO: 2940 - DNA, 36 bp, Artificial Sequence; identical to SEQ ID NO: 2600
  Synthetic

SEQ ID NO: 2941 - DNA, 36 bp, Artificial Sequence; identical to SEQ ID NO: 2600
  Synthetic

SEQ ID NO: 2942 - DNA, 36 bp, Artificial Sequence; identical to SEQ ID NO: 2600
  Synthetic

SEQ ID NO: 2943 - DNA, 36 bp, Artificial Sequence; identical to SEQ ID NO: 2600
  Synthetic

SEQ ID NO: 2944 - DNA, 36 bp, Artificial Sequence; identical to SEQ ID NO: 2600
  Synthetic

SEQ ID NO: 2945 - DNA, 36 bp, Artificial Sequence; identical to SEQ ID NO: 2600
  Synthetic

SEQ ID NO: 2946 - DNA, 36 bp, Artificial Sequence; identical to SEQ ID NO: 2600
  Synthetic

SEQ ID NO: 2947 - DNA, 36 bp, Artificial Sequence; identical to SEQ ID NO: 2600
  Synthetic

SEQ ID NO: 2948 - DNA, 36 bp, Artificial Sequence; identical to SEQ ID NO: 2600
  Synthetic

SEQ ID NO: 2949 - DNA, 36 bp, Artificial Sequence; identical to SEQ ID NO: 2600
  Synthetic

SEQ ID NO: 2950 - DNA, 36 bp, Artificial Sequence; identical to SEQ ID NO: 2600
  Synthetic

SEQ ID NO: 2951 - DNA, 36 bp, Artificial Sequence; identical to SEQ ID NO: 2600
  Synthetic

SEQ ID NO: 2952 - DNA, 36 bp, Artificial Sequence; identical to SEQ ID NO: 2600
  Synthetic

SEQ ID NO: 2953 - DNA, 36 bp, Artificial Sequence; identical to SEQ ID NO: 2600
  Synthetic

SEQ ID NO: 2954 - DNA, 36 bp, Artificial Sequence; identical to SEQ ID NO: 2600
  Synthetic

SEQ ID NO: 2955 - DNA, 36 bp, Artificial Sequence; identical to SEQ ID NO: 2600
  Synthetic

SEQ ID NO: 2956 - DNA, 36 bp, Artificial Sequence; identical to SEQ ID NO: 2600
  Synthetic

SEQ ID NO: 2957 - DNA, 36 bp, Artificial Sequence; identical to SEQ ID NO: 2600
  Synthetic

SEQ ID NO: 2958 - DNA, 36 bp, Artificial Sequence; identical to SEQ ID NO: 2600
  Synthetic

SEQ ID NO: 2959 - DNA, 36 bp, Artificial Sequence; identical to SEQ ID NO: 2600
  Synthetic

SEQ ID NO: 2960 - DNA, 36 bp, Artificial Sequence; identical to SEQ ID NO: 2600
  Synthetic

SEQ ID NO: 2961 - DNA, 36 bp, Artificial Sequence; identical to SEQ ID NO: 2600
  Synthetic

SEQ ID NO: 2962 - DNA, 36 bp, Artificial Sequence; identical to SEQ ID NO: 2600
  Synthetic

SEQ ID NO: 2963 - DNA, 36 bp, Artificial Sequence; identical to SEQ ID NO: 2600
  Synthetic

SEQ ID NO: 2964 - DNA, 36 bp, Artificial Sequence; identical to SEQ ID NO: 2600
  Synthetic

SEQ ID NO: 2965 - DNA, 36 bp, Artificial Sequence; identical to SEQ ID NO: 2600
  Synthetic

SEQ ID NO: 2966 - DNA, 36 bp, Artificial Sequence; identical to SEQ ID NO: 2600
  Synthetic

SEQ ID NO: 2967 - DNA, 36 bp, Artificial Sequence; identical to SEQ ID NO: 2600
  Synthetic

SEQ ID NO: 2968 - DNA, 36 bp, Artificial Sequence; identical to SEQ ID NO: 2600
  Synthetic

SEQ ID NO: 2969 - DNA, 36 bp, Artificial Sequence; identical to SEQ ID NO: 2600
  Synthetic

SEQ ID NO: 2970 - DNA, 36 bp, Artificial Sequence; identical to SEQ ID NO: 2600
  Synthetic

SEQ ID NO: 2971 - DNA, 36 bp, Artificial Sequence; identical to SEQ ID NO: 2600
  Synthetic

SEQ ID NO: 2972 - DNA, 36 bp, Artificial Sequence; identical to SEQ ID NO: 2600
  Synthetic

SEQ ID NO: 2973 - DNA, 36 bp, Artificial Sequence; identical to SEQ ID NO: 2600
  Synthetic

SEQ ID NO: 2974 - DNA, 36 bp, Artificial Sequence; identical to SEQ ID NO: 2600
  Synthetic

SEQ ID NO: 2975 - DNA, 36 bp, Artificial Sequence; identical to SEQ ID NO: 2600
  Synthetic

SEQ ID NO: 2976 - DNA, 36 bp, Artificial Sequence; identical to SEQ ID NO: 2600
  Synthetic

SEQ ID NO: 2977 - DNA, 36 bp, Artificial Sequence; identical to SEQ ID NO: 2600
  Synthetic

SEQ ID NO: 2978 - DNA, 36 bp, Artificial Sequence; identical to SEQ ID NO: 2600
  Synthetic

SEQ ID NO: 2979 - DNA, 36 bp, Artificial Sequence; identical to SEQ ID NO: 2600
  Synthetic

SEQ ID NO: 2980 - DNA, 36 bp, Artificial Sequence; identical to SEQ ID NO: 2600
  Synthetic

SEQ ID NO: 2981 - DNA, 36 bp, Artificial Sequence; identical to SEQ ID NO: 2600
  Synthetic

SEQ ID NO: 2982 - DNA, 36 bp, Artificial Sequence; identical to SEQ ID NO: 2600
  Synthetic

SEQ ID NO: 2983 - DNA, 36 bp, Artificial Sequence; identical to SEQ ID NO: 2600
  Synthetic

SEQ ID NO: 2984 - DNA, 36 bp, Artificial Sequence; identical to SEQ ID NO: 2600
  Synthetic

SEQ ID NO: 2985 - DNA, 36 bp, Artificial Sequence; identical to SEQ ID NO: 2600
  Synthetic

SEQ ID NO: 2986 - DNA, 36 bp, Artificial Sequence; identical to SEQ ID NO: 2600
  Synthetic

SEQ ID NO: 2987 - DNA, 36 bp, Artificial Sequence; identical to SEQ ID NO: 2600
  Synthetic

SEQ ID NO: 2988 - DNA, 36 bp, Artificial Sequence; identical to SEQ ID NO: 2600
  Synthetic

SEQ ID NO: 2989 - DNA, 36 bp, Artificial Sequence; identical to SEQ ID NO: 2600
  Synthetic

SEQ ID NO: 2990 - DNA, 36 bp, Artificial Sequence; identical to SEQ ID NO: 2600
  Synthetic

SEQ ID NO: 2991 - DNA, 36 bp, Artificial Sequence; identical to SEQ ID NO: 2600
  Synthetic

SEQ ID NO: 2992 - DNA, 36 bp, Artificial Sequence; identical to SEQ ID NO: 2600
  Synthetic

SEQ ID NO: 2993 - DNA, 36 bp, Artificial Sequence; identical to SEQ ID NO: 2600
  Synthetic

SEQ ID NO: 2994 - DNA, 36 bp, Artificial Sequence; identical to SEQ ID NO: 2600
  Synthetic

SEQ ID NO: 2995 - DNA, 36 bp, Artificial Sequence; identical to SEQ ID NO: 2600
  Synthetic

SEQ ID NO: 2996 - DNA, 36 bp, Artificial Sequence; identical to SEQ ID NO: 2600
  Synthetic

SEQ ID NO: 2997 - DNA, 36 bp, Artificial Sequence; identical to SEQ ID NO: 2600
  Synthetic

SEQ ID NO: 2998 - DNA, 36 bp, Artificial Sequence; identical to SEQ ID NO: 2600
  Synthetic

SEQ ID NO: 2999 - DNA, 36 bp, Artificial Sequence; identical to SEQ ID NO: 2600
  Synthetic

SEQ ID NO: 3000 - DNA, 36 bp, Artificial Sequence; identical to SEQ ID NO: 2600
  Synthetic

SEQ ID NO: 3001 - DNA, 36 bp, Artificial Sequence; identical to SEQ ID NO: 2600
  Synthetic

SEQ ID NO: 3002 - DNA, 36 bp, Artificial Sequence; identical to SEQ ID NO: 2600
  Synthetic

SEQ ID NO: 3003 - DNA, 36 bp, Artificial Sequence; identical to SEQ ID NO: 2600
  Synthetic

SEQ ID NO: 3004 - DNA, 36 bp, Artificial Sequence; identical to SEQ ID NO: 2600
  Synthetic

SEQ ID NO: 3005 - DNA, 36 bp, Artificial Sequence; identical to SEQ ID NO: 2600
  Synthetic

SEQ ID NO: 3006 - DNA, 36 bp, Artificial Sequence; identical to SEQ ID NO: 2600
  Synthetic

SEQ ID NO: 3007 - DNA, 36 bp, Artificial Sequence; identical to SEQ ID NO: 2600
  Synthetic

SEQ ID NO: 3008 - DNA, 36 bp, Artificial Sequence; identical to SEQ ID NO: 2600
  Synthetic

SEQ ID NO: 3009 - DNA, 36 bp, Artificial Sequence; identical to SEQ ID NO: 2600
  Synthetic

SEQ ID NO: 3010 - DNA, 36 bp, Artificial Sequence; identical to SEQ ID NO: 2600
  Synthetic

SEQ ID NO: 3011 - DNA, 36 bp, Artificial Sequence; identical to SEQ ID NO: 2600
  Synthetic

SEQ ID NO: 3012 - DNA, 36 bp, Artificial Sequence; identical to SEQ ID NO: 2600
  Synthetic

SEQ ID NO: 3013 - DNA, 36 bp, Artificial Sequence; identical to SEQ ID NO: 2600
  Synthetic

SEQ ID NO: 3014 - DNA, 36 bp, Artificial Sequence; identical to SEQ ID NO: 2600
  Synthetic

SEQ ID NO: 3015 - DNA, 36 bp, Artificial Sequence; identical to SEQ ID NO: 2600
  Synthetic

SEQ ID NO: 3016 - DNA, 36 bp, Artificial Sequence; identical to SEQ ID NO: 2600
  Synthetic

SEQ ID NO: 3017 - DNA, 36 bp, Artificial Sequence; identical to SEQ ID NO: 2600
  Synthetic

SEQ ID NO: 3018 - DNA, 36 bp, Artificial Sequence; identical to SEQ ID NO: 2600
  Synthetic

SEQ ID NO: 3019 - DNA, 36 bp, Artificial Sequence; identical to SEQ ID NO: 2600
  Synthetic

SEQ ID NO: 3020 - DNA, 36 bp, Artificial Sequence; identical to SEQ ID NO: 2600
  Synthetic

SEQ ID NO: 3021 - DNA, 36 bp, Artificial Sequence; identical to SEQ ID NO: 2600
  Synthetic

SEQ ID NO: 3022 - DNA, 36 bp, Artificial Sequence; identical to SEQ ID NO: 2600
  Synthetic

SEQ ID NO: 3023 - DNA, 36 bp, Artificial Sequence; identical to SEQ ID NO: 2600
  Synthetic

SEQ ID NO: 3024 - DNA, 36 bp, Artificial Sequence; identical to SEQ ID NO: 2600
  Synthetic

SEQ ID NO: 3025 - DNA, 36 bp, Artificial Sequence; identical to SEQ ID NO: 2600
  Synthetic

SEQ ID NO: 3026 - DNA, 36 bp, Artificial Sequence; identical to SEQ ID NO: 2600
  Synthetic

SEQ ID NO: 3027 - DNA, 36 bp, Artificial Sequence; identical to SEQ ID NO: 2600
  Synthetic

SEQ ID NO: 3028 - DNA, 36 bp, Artificial Sequence; identical to SEQ ID NO: 2600
  Synthetic

SEQ ID NO: 3029 - DNA, 36 bp, Artificial Sequence; identical to SEQ ID NO: 2600
  Synthetic

SEQ ID NO: 3030 - DNA, 36 bp, Artificial Sequence; identical to SEQ ID NO: 2600
  Synthetic

SEQ ID NO: 3031 - DNA, 36 bp, Artificial Sequence; identical to SEQ ID NO: 2600
  Synthetic

SEQ ID NO: 3032 - DNA, 36 bp, Artificial Sequence; identical to SEQ ID NO: 2600
  Synthetic

SEQ ID NO: 3033 - DNA, 36 bp, Artificial Sequence; identical to SEQ ID NO: 2600
  Synthetic

SEQ ID NO: 3034 - DNA, 36 bp, Artificial Sequence; identical to SEQ ID NO: 2600
  Synthetic

SEQ ID NO: 3035 - DNA, 36 bp, Artificial Sequence; identical to SEQ ID NO: 2600
  Synthetic

SEQ ID NO: 3036 - DNA, 36 bp, Artificial Sequence; identical to SEQ ID NO: 2600
  Synthetic

SEQ ID NO: 3037 - DNA, 36 bp, Artificial Sequence; identical to SEQ ID NO: 2600
  Synthetic

SEQ ID NO: 3038 - DNA, 36 bp, Artificial Sequence; identical to SEQ ID NO: 2600
  Synthetic

SEQ ID NO: 3039 - DNA, 36 bp, Artificial Sequence; identical to SEQ ID NO: 2600
  Synthetic

SEQ ID NO: 3040 - DNA, 36 bp, Artificial Sequence; identical to SEQ ID NO: 2600
  Synthetic

SEQ ID NO: 3041 - DNA, 36 bp, Artificial Sequence; identical to SEQ ID NO: 2600
  Synthetic

SEQ ID NO: 3042 - DNA, 36 bp, Artificial Sequence; identical to SEQ ID NO: 2600
  Synthetic

SEQ ID NO: 3043 - DNA, 36 bp, Artificial Sequence; identical to SEQ ID NO: 2600
  Synthetic

SEQ ID NO: 3044 - DNA, 36 bp, Artificial Sequence; identical to SEQ ID NO: 2600
  Synthetic

SEQ ID NO: 3045 - DNA, 36 bp, Artificial Sequence; identical to SEQ ID NO: 2600
  Synthetic

SEQ ID NO: 3046 - DNA, 36 bp, Artificial Sequence; identical to SEQ ID NO: 2600
  Synthetic

SEQ ID NO: 3047 - DNA, 36 bp, Artificial Sequence; identical to SEQ ID NO: 2600
  Synthetic

SEQ ID NO: 3048 - DNA, 36 bp, Artificial Sequence; identical to SEQ ID NO: 2600
  Synthetic

SEQ ID NO: 3049 - DNA, 36 bp, Artificial Sequence; identical to SEQ ID NO: 2600
  Synthetic

SEQ ID NO: 3050 - DNA, 36 bp, Artificial Sequence; identical to SEQ ID NO: 2600
  Synthetic

SEQ ID NO: 3051 - DNA, 36 bp, Artificial Sequence; identical to SEQ ID NO: 2600
  Synthetic

SEQ ID NO: 3052 - DNA, 36 bp, Artificial Sequence; identical to SEQ ID NO: 2600
  Synthetic

SEQ ID NO: 3053 - DNA, 36 bp, Artificial Sequence; identical to SEQ ID NO: 2600
  Synthetic

SEQ ID NO: 3054 - DNA, 36 bp, Artificial Sequence; identical to SEQ ID NO: 2600
  Synthetic

SEQ ID NO: 3055 - DNA, 36 bp, Artificial Sequence; identical to SEQ ID NO: 2600
  Synthetic

SEQ ID NO: 3056 - DNA, 36 bp, Artificial Sequence; identical to SEQ ID NO: 2600
  Synthetic

SEQ ID NO: 3057 - DNA, 36 bp, Artificial Sequence; identical to SEQ ID NO: 2600
  Synthetic

SEQ ID NO: 3058 - DNA, 36 bp, Artificial Sequence; identical to SEQ ID NO: 2600
  Synthetic

SEQ ID NO: 3059 - DNA, 36 bp, Artificial Sequence; identical to SEQ ID NO: 2600
  Synthetic

SEQ ID NO: 3060 - DNA, 36 bp, Artificial Sequence; identical to SEQ ID NO: 2600
  Synthetic

SEQ ID NO: 3061 - DNA, 36 bp, Artificial Sequence; identical to SEQ ID NO: 2600
  Synthetic

SEQ ID NO: 3062 - DNA, 36 bp, Artificial Sequence; identical to SEQ ID NO: 2600
  Synthetic

SEQ ID NO: 3063 - DNA, 36 bp, Artificial Sequence; identical to SEQ ID NO: 2600
  Synthetic

SEQ ID NO: 3064 - DNA, 36 bp, Artificial Sequence; identical to SEQ ID NO: 2600
  Synthetic

SEQ ID NO: 3065 - DNA, 36 bp, Artificial Sequence; identical to SEQ ID NO: 2600
  Synthetic

SEQ ID NO: 3066 - DNA, 36 bp, Artificial Sequence; identical to SEQ ID NO: 2600
  Synthetic

SEQ ID NO: 3067 - DNA, 36 bp, Artificial Sequence; identical to SEQ ID NO: 2600
  Synthetic

SEQ ID NO: 3068 - DNA, 36 bp, Artificial Sequence; identical to SEQ ID NO: 2600
  Synthetic

SEQ ID NO: 3069 - DNA, 36 bp, Artificial Sequence; identical to SEQ ID NO: 2600
  Synthetic

SEQ ID NO: 3070 - DNA, 36 bp, Artificial Sequence; identical to SEQ ID NO: 2600
  Synthetic

SEQ ID NO: 3071 - DNA, 36 bp, Artificial Sequence; identical to SEQ ID NO: 2600
  Synthetic

SEQ ID NO: 3072 - DNA, 36 bp, Artificial Sequence; identical to SEQ ID NO: 2600
  Synthetic

SEQ ID NO: 3073 - DNA, 36 bp, Artificial Sequence; identical to SEQ ID NO: 2600
  Synthetic

SEQ ID NO: 3074 - DNA, 36 bp, Artificial Sequence; identical to SEQ ID NO: 2600
  Synthetic

SEQ ID NO: 3075 - DNA, 36 bp, Artificial Sequence; identical to SEQ ID NO: 2600
  Synthetic

SEQ ID NO: 3076 - DNA, 36 bp, Artificial Sequence; identical to SEQ ID NO: 2190
  Synthetic

SEQ ID NO: 3077 - DNA, 36 bp, Artificial Sequence; identical to SEQ ID NO: 2190
  Synthetic

SEQ ID NO: 3078 - DNA, 36 bp, Artificial Sequence; identical to SEQ ID NO: 2190
  Synthetic

SEQ ID NO: 3079 - DNA, 36 bp, Artificial Sequence; identical to SEQ ID NO: 2190
  Synthetic

SEQ ID NO: 3080 - DNA, 36 bp, Artificial Sequence; identical to SEQ ID NO: 2190
  Synthetic

SEQ ID NO: 3081 - DNA, 36 bp, Artificial Sequence; identical to SEQ ID NO: 2190
  Synthetic

SEQ ID NO: 3082 - DNA, 36 bp, Artificial Sequence; identical to SEQ ID NO: 2190
  Synthetic

SEQ ID NO: 3083 - DNA, 36 bp, Artificial Sequence; identical to SEQ ID NO: 2190
  Synthetic

SEQ ID NO: 3084 - DNA, 36 bp, Artificial Sequence; identical to SEQ ID NO: 2190
  Synthetic

SEQ ID NO: 3085 - DNA, 36 bp, Artificial Sequence; identical to SEQ ID NO: 2190
  Synthetic

SEQ ID NO: 3086 - DNA, 36 bp, Artificial Sequence; identical to SEQ ID NO: 2190
  Synthetic

SEQ ID NO: 3087 - DNA, 36 bp, Artificial Sequence; identical to SEQ ID NO: 2190
  Synthetic

SEQ ID NO: 3088 - DNA, 36 bp, Artificial Sequence; identical to SEQ ID NO: 2190
  Synthetic

SEQ ID NO: 3089 - DNA, 36 bp, Artificial Sequence; identical to SEQ ID NO: 2190
  Synthetic

SEQ ID NO: 3090 - DNA, 36 bp, Artificial Sequence; identical to SEQ ID NO: 2190
  Synthetic

SEQ ID NO: 3091 - DNA, 36 bp, Artificial Sequence; identical to SEQ ID NO: 2190
  Synthetic

SEQ ID NO: 3092 - DNA, 36 bp, Artificial Sequence; identical to SEQ ID NO: 2190
  Synthetic

SEQ ID NO: 3093 - DNA, 36 bp, Artificial Sequence; identical to SEQ ID NO: 2190
  Synthetic

SEQ ID NO: 3094 - DNA, 36 bp, Artificial Sequence; identical to SEQ ID NO: 2190
  Synthetic

SEQ ID NO: 3095 - DNA, 36 bp, Artificial Sequence; identical to SEQ ID NO: 2190
  Synthetic

SEQ ID NO: 3096 - DNA, 36 bp, Artificial Sequence; identical to SEQ ID NO: 2190
  Synthetic

SEQ ID NO: 3097 - DNA, 36 bp, Artificial Sequence; identical to SEQ ID NO: 2190
  Synthetic

SEQ ID NO: 3098 - DNA, 36 bp, Artificial Sequence; identical to SEQ ID NO: 2190
  Synthetic

SEQ ID NO: 3099 - DNA, 36 bp, Artificial Sequence; identical to SEQ ID NO: 2190
  Synthetic

SEQ ID NO: 3100 - DNA, 36 bp, Artificial Sequence; identical to SEQ ID NO: 2190
  Synthetic

SEQ ID NO: 3101 - DNA, 36 bp, Artificial Sequence; identical to SEQ ID NO: 2190
  Synthetic

SEQ ID NO: 3102 - DNA, 36 bp, Artificial Sequence; identical to SEQ ID NO: 2190
  Synthetic

SEQ ID NO: 3103 - DNA, 36 bp, Artificial Sequence; identical to SEQ ID NO: 2190
  Synthetic

SEQ ID NO: 3104 - DNA, 36 bp, Artificial Sequence; identical to SEQ ID NO: 2190
  Synthetic

SEQ ID NO: 3105 - DNA, 36 bp, Artificial Sequence; identical to SEQ ID NO: 2190
  Synthetic

SEQ ID NO: 3106 - DNA, 36 bp, Artificial Sequence; identical to SEQ ID NO: 2190
  Synthetic

SEQ ID NO: 3107 - DNA, 36 bp, Artificial Sequence; identical to SEQ ID NO: 2190
  Synthetic

SEQ ID NO: 3108 - DNA, 36 bp, Artificial Sequence; identical to SEQ ID NO: 2190
  Synthetic

SEQ ID NO: 3109 - DNA, 36 bp, Artificial Sequence; identical to SEQ ID NO: 2190
  Synthetic

SEQ ID NO: 3110 - DNA, 36 bp, Artificial Sequence; identical to SEQ ID NO: 2190
  Synthetic

SEQ ID NO: 3111 - DNA, 36 bp, Artificial Sequence; identical to SEQ ID NO: 2190
  Synthetic

SEQ ID NO: 3112 - DNA, 36 bp, Artificial Sequence; identical to SEQ ID NO: 2190
  Synthetic

SEQ ID NO: 3113 - DNA, 36 bp, Artificial Sequence; identical to SEQ ID NO: 2190
  Synthetic

SEQ ID NO: 3114 - DNA, 36 bp, Artificial Sequence; identical to SEQ ID NO: 2190
  Synthetic

SEQ ID NO: 3115 - DNA, 36 bp, Artificial Sequence; identical to SEQ ID NO: 2190
  Synthetic

SEQ ID NO: 3116 - DNA, 36 bp, Artificial Sequence; identical to SEQ ID NO: 2190
  Synthetic

SEQ ID NO: 3117 - DNA, 36 bp, Artificial Sequence; identical to SEQ ID NO: 2190
  Synthetic

SEQ ID NO: 3118 - DNA, 36 bp, Artificial Sequence; identical to SEQ ID NO: 2190
  Synthetic

SEQ ID NO: 3119 - DNA, 36 bp, Artificial Sequence; identical to SEQ ID NO: 2190
  Synthetic

SEQ ID NO: 3120 - DNA, 36 bp, Artificial Sequence; identical to SEQ ID NO: 2190
  Synthetic

SEQ ID NO: 3121 - DNA, 36 bp, Artificial Sequence; identical to SEQ ID NO: 2190
  Synthetic

SEQ ID NO: 3122 - DNA, 36 bp, Artificial Sequence; identical to SEQ ID NO: 2190
  Synthetic

SEQ ID NO: 3123 - DNA, 36 bp, Artificial Sequence; identical to SEQ ID NO: 2190
  Synthetic

SEQ ID NO: 3124 - DNA, 36 bp, Artificial Sequence; identical to SEQ ID NO: 2190
  Synthetic

SEQ ID NO: 3125 - DNA, 36 bp, Artificial Sequence; identical to SEQ ID NO: 2190
  Synthetic

SEQ ID NO: 3126 - DNA, 36 bp, Artificial Sequence; identical to SEQ ID NO: 2190
  Synthetic

SEQ ID NO: 3127 - DNA, 36 bp, Artificial Sequence; identical to SEQ ID NO: 2190
  Synthetic

SEQ ID NO: 3128 - DNA, 36 bp, Artificial Sequence; identical to SEQ ID NO: 2190
  Synthetic

SEQ ID NO: 3129 - DNA, 36 bp, Artificial Sequence; identical to SEQ ID NO: 2190
  Synthetic

SEQ ID NO: 3130 - DNA, 36 bp, Artificial Sequence; identical to SEQ ID NO: 2190
  Synthetic

SEQ ID NO: 3131 - DNA, 36 bp, Artificial Sequence; identical to SEQ ID NO: 2190
  Synthetic

SEQ ID NO: 3132 - DNA, 36 bp, Artificial Sequence; identical to SEQ ID NO: 2190
  Synthetic

SEQ ID NO: 3133 - DNA, 36 bp, Artificial Sequence; identical to SEQ ID NO: 2190
  Synthetic

SEQ ID NO: 3134 - DNA, 36 bp, Artificial Sequence; identical to SEQ ID NO: 2190
  Synthetic

SEQ ID NO: 3135 - DNA, 36 bp, Artificial Sequence; identical to SEQ ID NO: 2190
  Synthetic

SEQ ID NO: 3136 - DNA, 36 bp, Artificial Sequence; identical to SEQ ID NO: 2190
  Synthetic

SEQ ID NO: 3137 - DNA, 36 bp, Artificial Sequence; identical to SEQ ID NO: 2190
  Synthetic

SEQ ID NO: 3138 - DNA, 36 bp, Artificial Sequence; identical to SEQ ID NO: 2190
  Synthetic

SEQ ID NO: 3139 - DNA, 36 bp, Artificial Sequence; identical to SEQ ID NO: 2190
  Synthetic

SEQ ID NO: 3140 - DNA, 36 bp, Artificial Sequence; identical to SEQ ID NO: 2190
  Synthetic

SEQ ID NO: 3141 - DNA, 36 bp, Artificial Sequence; identical to SEQ ID NO: 2190
  Synthetic

SEQ ID NO: 3142 - DNA, 36 bp, Artificial Sequence; identical to SEQ ID NO: 2190
  Synthetic

SEQ ID NO: 3143 - DNA, 36 bp, Artificial Sequence; identical to SEQ ID NO: 2190
  Synthetic

SEQ ID NO: 3144 - DNA, 36 bp, Artificial Sequence; identical to SEQ ID NO: 2190
  Synthetic

SEQ ID NO: 3145 - DNA, 36 bp, Artificial Sequence; identical to SEQ ID NO: 2190
  Synthetic

SEQ ID NO: 3146 - DNA, 36 bp, Artificial Sequence; identical to SEQ ID NO: 2190
  Synthetic

SEQ ID NO: 3147 - DNA, 36 bp, Artificial Sequence; identical to SEQ ID NO: 2190
  Synthetic

SEQ ID NO: 3148 - DNA, 36 bp, Artificial Sequence; identical to SEQ ID NO: 2190
  Synthetic

SEQ ID NO: 3149 - DNA, 36 bp, Artificial Sequence; identical to SEQ ID NO: 2600
  Synthetic

SEQ ID NO: 3150 - DNA, 36 bp, Artificial Sequence; identical to SEQ ID NO: 2600
  Synthetic

SEQ ID NO: 3151 - DNA, 36 bp, Artificial Sequence; identical to SEQ ID NO: 2600
  Synthetic

SEQ ID NO: 3152 - DNA, 36 bp, Artificial Sequence; identical to SEQ ID NO: 2600
  Synthetic

SEQ ID NO: 3153 - DNA, 36 bp, Artificial Sequence; identical to SEQ ID NO: 2600
  Synthetic

SEQ ID NO: 3154 - DNA, 36 bp, Artificial Sequence; identical to SEQ ID NO: 2600
  Synthetic

SEQ ID NO: 3155 - DNA, 36 bp, Artificial Sequence; identical to SEQ ID NO: 2600
  Synthetic

SEQ ID NO: 3156 - DNA, 36 bp, Artificial Sequence; identical to SEQ ID NO: 2600
  Synthetic

SEQ ID NO: 3157 - DNA, 36 bp, Artificial Sequence; identical to SEQ ID NO: 2600
  Synthetic

SEQ ID NO: 3158 - DNA, 36 bp, Artificial Sequence; identical to SEQ ID NO: 2600
  Synthetic

SEQ ID NO: 3159 - DNA, 36 bp, Artificial Sequence; identical to SEQ ID NO: 2600
  Synthetic

SEQ ID NO: 3160 - DNA, 36 bp, Artificial Sequence; identical to SEQ ID NO: 2600
  Synthetic

SEQ ID NO: 3161 - DNA, 36 bp, Artificial Sequence; identical to SEQ ID NO: 2600
  Synthetic

SEQ ID NO: 3162 - DNA, 36 bp, Artificial Sequence; identical to SEQ ID NO: 2600
  Synthetic

SEQ ID NO: 3163 - DNA, 36 bp, Artificial Sequence; identical to SEQ ID NO: 2600
  Synthetic

SEQ ID NO: 3164 - DNA, 36 bp, Artificial Sequence; identical to SEQ ID NO: 2600
  Synthetic

SEQ ID NO: 3165 - DNA, 36 bp, Artificial Sequence; identical to SEQ ID NO: 2600
  Synthetic

SEQ ID NO: 3166 - DNA, 36 bp, Artificial Sequence; identical to SEQ ID NO: 2600
  Synthetic

SEQ ID NO: 3167 - DNA, 36 bp, Artificial Sequence; identical to SEQ ID NO: 2600
  Synthetic

SEQ ID NO: 3168 - DNA, 36 bp, Artificial Sequence; identical to SEQ ID NO: 2600
  Synthetic

SEQ ID NO: 3169 - DNA, 36 bp, Artificial Sequence; identical to SEQ ID NO: 2600
  Synthetic

SEQ ID NO: 3170 - DNA, 36 bp, Artificial Sequence; identical to SEQ ID NO: 2600
  Synthetic

SEQ ID NO: 3171 - DNA, 36 bp, Artificial Sequence; identical to SEQ ID NO: 2600
  Synthetic

SEQ ID NO: 3172 - DNA, 36 bp, Artificial Sequence; identical to SEQ ID NO: 2600
  Synthetic

SEQ ID NO: 3173 - DNA, 36 bp, Artificial Sequence; identical to SEQ ID NO: 2600
  Synthetic

SEQ ID NO: 3174 - DNA, 36 bp, Artificial Sequence; identical to SEQ ID NO: 2600
  Synthetic

SEQ ID NO: 3175 - DNA, 36 bp, Artificial Sequence; identical to SEQ ID NO: 2600
  Synthetic

SEQ ID NO: 3176 - DNA, 36 bp, Artificial Sequence; identical to SEQ ID NO: 2600
  Synthetic

SEQ ID NO: 3177 - DNA, 36 bp, Artificial Sequence; identical to SEQ ID NO: 2600
  Synthetic

SEQ ID NO: 3178 - DNA, 36 bp, Artificial Sequence; identical to SEQ ID NO: 2600
  Synthetic

SEQ ID NO: 3179 - DNA, 36 bp, Artificial Sequence; identical to SEQ ID NO: 2600
  Synthetic

SEQ ID NO: 3180 - DNA, 36 bp, Artificial Sequence; identical to SEQ ID NO: 2600
  Synthetic

SEQ ID NO: 3181 - DNA, 36 bp, Artificial Sequence; identical to SEQ ID NO: 2600
  Synthetic

SEQ ID NO: 3182 - DNA, 36 bp, Artificial Sequence; identical to SEQ ID NO: 2600
  Synthetic

SEQ ID NO: 3183 - DNA, 36 bp, Artificial Sequence; identical to SEQ ID NO: 2600
  Synthetic

SEQ ID NO: 3184 - DNA, 36 bp, Artificial Sequence; identical to SEQ ID NO: 2600
  Synthetic

SEQ ID NO: 3185 - DNA, 36 bp, Artificial Sequence; identical to SEQ ID NO: 2600
  Synthetic

SEQ ID NO: 3186 - DNA, 36 bp, Artificial Sequence; identical to SEQ ID NO: 2600
  Synthetic

SEQ ID NO: 3187 - DNA, 36 bp, Artificial Sequence; identical to SEQ ID NO: 2600
  Synthetic

SEQ ID NO: 3188 - DNA, 36 bp, Artificial Sequence; identical to SEQ ID NO: 2600
  Synthetic

SEQ ID NO: 3189 - DNA, 36 bp, Artificial Sequence; identical to SEQ ID NO: 2600
  Synthetic

SEQ ID NO: 3190 - DNA, 36 bp, Artificial Sequence; identical to SEQ ID NO: 2600
  Synthetic

SEQ ID NO: 3191 - DNA, 36 bp, Artificial Sequence; identical to SEQ ID NO: 2600
  Synthetic

SEQ ID NO: 3192 - DNA, 36 bp, Artificial Sequence; identical to SEQ ID NO: 2600
  Synthetic

SEQ ID NO: 3193 - DNA, 36 bp, Artificial Sequence; identical to SEQ ID NO: 2600
  Synthetic

SEQ ID NO: 3194 - DNA, 36 bp, Artificial Sequence; identical to SEQ ID NO: 2600
  Synthetic

SEQ ID NO: 3195 - DNA, 36 bp, Artificial Sequence; identical to SEQ ID NO: 2600
  Synthetic

SEQ ID NO: 3196 - DNA, 36 bp, Artificial Sequence; identical to SEQ ID NO: 2600
  Synthetic

SEQ ID NO: 3197 - DNA, 36 bp, Artificial Sequence; identical to SEQ ID NO: 2600
  Synthetic

SEQ ID NO: 3198 - DNA, 36 bp, Artificial Sequence; identical to SEQ ID NO: 2600
  Synthetic

SEQ ID NO: 3199 - DNA, 36 bp, Artificial Sequence; identical to SEQ ID NO: 2600
  Synthetic

SEQ ID NO: 3200 - DNA, 36 bp, Artificial Sequence; identical to SEQ ID NO: 2600
  Synthetic

SEQ ID NO: 3201 - DNA, 36 bp, Artificial Sequence; identical to SEQ ID NO: 2600
  Synthetic

SEQ ID NO: 3202 - DNA, 36 bp, Artificial Sequence; identical to SEQ ID NO: 2600
  Synthetic

SEQ ID NO: 3203 - DNA, 36 bp, Artificial Sequence; identical to SEQ ID NO: 2600
  Synthetic

SEQ ID NO: 3204 - DNA, 36 bp, Artificial Sequence; identical to SEQ ID NO: 2600
  Synthetic

SEQ ID NO: 3205 - DNA, 36 bp, Artificial Sequence; identical to SEQ ID NO: 2600
  Synthetic

SEQ ID NO: 3206 - DNA, 36 bp, Artificial Sequence; identical to SEQ ID NO: 2600
  Synthetic

SEQ ID NO: 3207 - DNA, 36 bp, Artificial Sequence; identical to SEQ ID NO: 2600
  Synthetic

SEQ ID NO: 3208 - DNA, 36 bp, Artificial Sequence; identical to SEQ ID NO: 2600
  Synthetic

SEQ ID NO: 3209 - DNA, 36 bp, Artificial Sequence; identical to SEQ ID NO: 2600
  Synthetic

SEQ ID NO: 3210 - DNA, 36 bp, Artificial Sequence; identical to SEQ ID NO: 2600
  Synthetic

SEQ ID NO: 3211 - DNA, 36 bp, Artificial Sequence; identical to SEQ ID NO: 2600
  Synthetic

SEQ ID NO: 3212 - DNA, 36 bp, Artificial Sequence; identical to SEQ ID NO: 2600
  Synthetic

SEQ ID NO: 3213 - DNA, 36 bp, Artificial Sequence; identical to SEQ ID NO: 2600
  Synthetic

SEQ ID NO: 3214 - DNA, 36 bp, Artificial Sequence; identical to SEQ ID NO: 2600
  Synthetic

SEQ ID NO: 3215 - DNA, 36 bp, Artificial Sequence; identical to SEQ ID NO: 2600
  Synthetic

SEQ ID NO: 3216 - DNA, 36 bp, Artificial Sequence; identical to SEQ ID NO: 2600
  Synthetic

SEQ ID NO: 3217 - DNA, 36 bp, Artificial Sequence; identical to SEQ ID NO: 2600
  Synthetic

SEQ ID NO: 3218 - DNA, 36 bp, Artificial Sequence; identical to SEQ ID NO: 2600
  Synthetic

SEQ ID NO: 3219 - DNA, 36 bp, Artificial Sequence; identical to SEQ ID NO: 2600
  Synthetic

SEQ ID NO: 3220 - DNA, 36 bp, Artificial Sequence; identical to SEQ ID NO: 2600
  Synthetic

SEQ ID NO: 3221 - DNA, 36 bp, Artificial Sequence; identical to SEQ ID NO: 2600
  Synthetic

SEQ ID NO: 3222 - DNA, 36 bp, Artificial Sequence; identical to SEQ ID NO: 2600
  Synthetic

SEQ ID NO: 3223 - DNA, 36 bp, Artificial Sequence; identical to SEQ ID NO: 2600
  Synthetic

SEQ ID NO: 3224 - DNA, 36 bp, Artificial Sequence; identical to SEQ ID NO: 2600
  Synthetic

SEQ ID NO: 3225 - DNA, 36 bp, Artificial Sequence; identical to SEQ ID NO: 2600
  Synthetic

SEQ ID NO: 3226 - DNA, 36 bp, Artificial Sequence; identical to SEQ ID NO: 2600
  Synthetic

SEQ ID NO: 3227 - DNA, 36 bp, Artificial Sequence; identical to SEQ ID NO: 2600
  Synthetic

SEQ ID NO: 3228 - DNA, 36 bp, Artificial Sequence; identical to SEQ ID NO: 2600
  Synthetic

SEQ ID NO: 3229 - DNA, 36 bp, Artificial Sequence; identical to SEQ ID NO: 2600
  Synthetic

SEQ ID NO: 3230 - DNA, 36 bp, Artificial Sequence; identical to SEQ ID NO: 2600
  Synthetic

SEQ ID NO: 3231 - DNA, 36 bp, Artificial Sequence; identical to SEQ ID NO: 2600
  Synthetic

SEQ ID NO: 3232 - DNA, 36 bp, Artificial Sequence; identical to SEQ ID NO: 2600
  Synthetic

SEQ ID NO: 3233 - DNA, 36 bp, Artificial Sequence; identical to SEQ ID NO: 2600
  Synthetic

SEQ ID NO: 3234 - DNA, 36 bp, Artificial Sequence; identical to SEQ ID NO: 2600
  Synthetic

SEQ ID NO: 3235 - DNA, 36 bp, Artificial Sequence; identical to SEQ ID NO: 2190
  Synthetic

SEQ ID NO: 3236 - DNA, 36 bp, Artificial Sequence; identical to SEQ ID NO: 2190
  Synthetic

SEQ ID NO: 3237 - DNA, 36 bp, Artificial Sequence; identical to SEQ ID NO: 2190
  Synthetic

SEQ ID NO: 3238 - DNA, 36 bp, Artificial Sequence; identical to SEQ ID NO: 2190
  Synthetic

SEQ ID NO: 3239 - DNA, 36 bp, Artificial Sequence; identical to SEQ ID NO: 2190
  Synthetic

SEQ ID NO: 3240 - DNA, 36 bp, Artificial Sequence; identical to SEQ ID NO: 2190
  Synthetic

SEQ ID NO: 3241 - DNA, 36 bp, Artificial Sequence; identical to SEQ ID NO: 2600
  Synthetic

SEQ ID NO: 3242 - DNA, 36 bp, Artificial Sequence; identical to SEQ ID NO: 2600
  Synthetic

SEQ ID NO: 3243 - DNA, 36 bp, Artificial Sequence; identical to SEQ ID NO: 2600
  Synthetic

SEQ ID NO: 3244 - DNA, 36 bp, Artificial Sequence; identical to SEQ ID NO: 2600
  Synthetic

SEQ ID NO: 3245 - DNA, 36 bp, Artificial Sequence; identical to SEQ ID NO: 2600
  Synthetic

SEQ ID NO: 3246 - DNA, 36 bp, Artificial Sequence; identical to SEQ ID NO: 2600
  Synthetic

SEQ ID NO: 3247 - DNA, 36 bp, Artificial Sequence; identical to SEQ ID NO: 2190
  Synthetic

SEQ ID NO: 3248 - DNA, 36 bp, Artificial Sequence; identical to SEQ ID NO: 2190
  Synthetic

SEQ ID NO: 3249 - DNA, 36 bp, Artificial Sequence; identical to SEQ ID NO: 2190
  Synthetic

SEQ ID NO: 3250 - DNA, 36 bp, Artificial Sequence; identical to SEQ ID NO: 2190
  Synthetic

SEQ ID NO: 3251 - DNA, 36 bp, Artificial Sequence; identical to SEQ ID NO: 2190
  Synthetic

SEQ ID NO: 3252 - DNA, 36 bp, Artificial Sequence; identical to SEQ ID NO: 2190
  Synthetic

SEQ ID NO: 3253 - DNA, 36 bp, Artificial Sequence; identical to SEQ ID NO: 2600
  Synthetic

SEQ ID NO: 3254 - DNA, 36 bp, Artificial Sequence; identical to SEQ ID NO: 2600
  Synthetic

SEQ ID NO: 3255 - DNA, 36 bp, Artificial Sequence; identical to SEQ ID NO: 2600
  Synthetic

SEQ ID NO: 3256 - DNA, 36 bp, Artificial Sequence; identical to SEQ ID NO: 2600
  Synthetic

SEQ ID NO: 3257 - DNA, 36 bp, Artificial Sequence; identical to SEQ ID NO: 2600
  Synthetic

SEQ ID NO: 3258 - DNA, 36 bp, Artificial Sequence; identical to SEQ ID NO: 2600
  Synthetic

SEQ ID NO: 3259 - DNA, 36 bp, Artificial Sequence; identical to SEQ ID NO: 2190
  Synthetic

SEQ ID NO: 3260 - DNA, 36 bp, Artificial Sequence; identical to SEQ ID NO: 2190
  Synthetic

SEQ ID NO: 3261 - DNA, 36 bp, Artificial Sequence; identical to SEQ ID NO: 2190
  Synthetic

SEQ ID NO: 3262 - DNA, 36 bp, Artificial Sequence; identical to SEQ ID NO: 2190
  Synthetic

SEQ ID NO: 3263 - DNA, 36 bp, Artificial Sequence; identical to SEQ ID NO: 2600
  Synthetic

SEQ ID NO: 3264 - DNA, 36 bp, Artificial Sequence; identical to SEQ ID NO: 2600
  Synthetic

SEQ ID NO: 3265 - DNA, 36 bp, Artificial Sequence; identical to SEQ ID NO: 2600
  Synthetic

SEQ ID NO: 3266 - DNA, 36 bp, Artificial Sequence; identical to SEQ ID NO: 2600
  Synthetic

SEQ ID NO: 3267 - DNA, 36 bp, Artificial Sequence; identical to SEQ ID NO: 2190
  Synthetic

SEQ ID NO: 3268 - DNA, 36 bp, Artificial Sequence; identical to SEQ ID NO: 2600
  Synthetic

SEQ ID NO: 3269 - DNA, 36 bp, Artificial Sequence; identical to SEQ ID NO: 2190
  Synthetic

SEQ ID NO: 3270 - DNA, 36 bp, Artificial Sequence; identical to SEQ ID NO: 2600
  Synthetic

SEQ ID NO: 3271 - DNA, 36 bp, Artificial Sequence; identical to SEQ ID NO: 2190
  Synthetic

SEQ ID NO: 3272 - DNA, 36 bp, Artificial Sequence; identical to SEQ ID NO: 2190
  Synthetic

SEQ ID NO: 3273 - DNA, 36 bp, Artificial Sequence; identical to SEQ ID NO: 2190
  Synthetic

SEQ ID NO: 3274 - DNA, 36 bp, Artificial Sequence; identical to SEQ ID NO: 2190
  Synthetic

SEQ ID NO: 3275 - DNA, 36 bp, Artificial Sequence; identical to SEQ ID NO: 2600
  Synthetic

SEQ ID NO: 3276 - DNA, 36 bp, Artificial Sequence; identical to SEQ ID NO: 2190
  Synthetic

SEQ ID NO: 3277 - DNA, 36 bp, Artificial Sequence; identical to SEQ ID NO: 2600
  Synthetic

SEQ ID NO: 3278 - DNA, 20 bp, Artificial Sequence
  Synthetic
taatttctactcttgtagat

SEQ ID NO: 3279 - DNA, 168 bp, Ebolavirus sp.
attcgcagtgaagagttgtctttcacagttgtatcaaacggagccaaaaacatcagtggtcagagtccggcgcgaacttcttccgacccagggaccaacacaacaactgaagaccacaaaatcatggcttcagaaaattcctctgcaatggttcaagtgcacagtcaa

SEQ ID NO: 3280 - DNA, 174 bp, Flavivirus sp.
gacaccggaactccacactggaacaacaaagaagcactggtagagttcaaggacgcacatgccaaaaggcaaactgtcgtggttctagggagtcaagaaggagcagttcacacggcccttgctggagctctggaggctgagatggatggtgcaaagggaaggctgtcctctggc

SEQ ID NO: 3281 - DNA, 173 bp, Stayphylococcus aureau
agcgattgatggtgatactgttaaattaatgtacaaaggtcaaccaatgacattcagactattattggttgatacacctgaaacaaagcatcctaaaaaaggtgtagagaaatatggtcctgaagcaagtgcatttacgaaaaagatggtagaaaatgcaaagaaaattgaag

SEQ ID NO: 3282 - DNA, 175 bp, Artificial Sequence
  Synthetic
cacctggatggaccgcctagccccaggagccccgtcataggaagtgaggtcttcctgcccaacagcaaccacgtggccagtggcgccggggaggcagccattgagacccagagcagcagttctgaagagatagtgcccagccctccctcgccaccccctctaccccgcatctaca

SEQ ID NO: 3283 - DNA, 175 bp, Artificial Sequence
  Synthetic
ggaggagccccagagcctgcaagctgccgtgcgcaccgatggcttcgacgagttcaaggtgcgcctgcaggacctcagctcttgcatcacccaggggaaagccattgagacccagagcagcagttctgaagagatagtgcccagccctccctcgccaccccctctaccccgcatc

SEQ ID NO: 3284 - DNA, 175 bp, Psueodomonas aeruginosa
gtcgggcgcgcacgttttcccttcgctgagcacgctgcgcgcgtcgcctacgtgaatgcgctgttcgatgcgttggccgaaggcaacccgcgggtgagcgtgctcgacccctccagcgtgctctgcgatggcctggattgtttcgccgaacgtgatggctggtcgctgtacatgg

SEQ ID NO: 3285 - DNA, 173 bp, Staphylococcus aureaus; identical to SEQ ID NO: 3281

SEQ ID NO: 3286 - DNA, 173 bp, Staphylococcus aureaus; identical to SEQ ID NO: 3281

SEQ ID NO: 3287 - DNA, 78 bp, Artificial Sequence
  Synthetic
ggccagtttgaataagacaatgaattatttttactatgtaaaaatccacatctttcacatttccattcttgtgtttca

SEQ ID NO: 3288 - DNA, 173 bp, Staphylococcus aureaus; identical to SEQ ID NO: 3281

SEQ ID NO: 3289 - DNA, 78 bp, Treponema denticola; identical to SEQ ID NO: 3287

SEQ ID NO: 3290 - DNA, 173 bp, Artificial Sequence
  Synthetic
ggccagtgaattcgagctcggtacccggggatcctctagaaatatggattacttggtagaacagcaatctactcgacctgcaggcatgcaagcttggcgtaatcatggtcatagctgtttcctgtgtttatccgctcacaattccacacaacatacgagccggaagcataaag

SEQ ID NO: 3291 - DNA, 173 bp, Staphylococcus aureaus; identical to SEQ ID NO: 3281

SEQ ID NO: 3292 - DNA, 170 bp, Flavivirus sp.
agtacatattcaggggccaacctctcaacaatgacgaagaccatgctcactggacagaagcaaaaatgctgctggacaacatcaacacaccagaagggattataccagctctctttgaaccagaaagggagaagtcagccgccatagacggtgaataccgcctgaagggt

SEQ ID NO: 3293 - DNA, 78 bp, Treponema denticola; identical to SEQ ID NO: 3287

SEQ ID NO: 3294 - DNA, 102 bp, Treponema denticola
attgttacattgtacacatacataagcaacataagcatcatttggtttaattccttcaattctagaaatatttgtttgattttttacttcacgcctactcat

SEQ ID NO: 3295 - DNA, 78 bp, Treponema denticola; identical to SEQ ID NO: 3287

SEQ ID NO: 3296 - DNA, 194 bp, Glycine sp.
aagttacaactcaataaggttgacgaaaacggcaccccaaaaccctcgtctcttggtcgcgccctctactccacccccatccacatttgggacaaagaaaccggtagcgttgccagcttcgccgcttccttcaacttcaccttctatgcccctgacacaaaaaggcttgcagatgggcttgccttctttctcgc

SEQ ID NO: 3297 - DNA, 173 bp, Artificial Sequence; identical to SEQ ID NO: 3290
  Synthetic

SEQ ID NO: 3298 - DNA, 174 bp, Flavivirus sp.; identical to SEQ ID NO: 3280

SEQ ID NO: 3299 - DNA, 170 bp, Flavivirus sp.; identical to SEQ ID NO: 3292

SEQ ID NO: 3300 - DNA, 173 bp, Artificial Sequence; identical to SEQ ID NO: 3290
  Synthetic

SEQ ID NO: 3301 - DNA, 48 bp, Artificial Sequence
  Synthetic
gaaattaatacgactcactatagggctacgtgaatgcgctgttcgatg

SEQ ID NO: 3302 - DNA, 25 bp, Artificial Sequence
  Synthetic
catcacgttcggcgaaacaatccag

SEQ ID NO: 3303 - DNA, 48 bp, Artificial Sequence; identical to SEQ ID NO: 3301
  Synthetic

SEQ ID NO: 3304 - DNA, 25 bp, Artificial Sequence
  Synthetic
catcacgttcggcgaaacaatccag

SEQ ID NO: 3305 - DNA, 48 bp, Artificial Sequence; identical to SEQ ID NO: 3301
  Synthetic

SEQ ID NO: 3306 - DNA, 25 bp, Artificial Sequence
  Synthetic
catcacgttcggcgaaacaatccag

SEQ ID NO: 3307 - DNA, 53 bp, Artificial Sequence
  Synthetic
gaaattaatacgactcactatagggtgtacaaaggtcaaccaatgacattcag

SEQ ID NO: 3308 - DNA, 25 bp, Artificial Sequence
  Synthetic
tgcacttgcttcaggaccatatttc

SEQ ID NO: 3309 - DNA, 53 bp, Artificial Sequence; identical to SEQ ID NO: 3307
  Synthetic

SEQ ID NO: 3310 - DNA, 25 bp, Artificial Sequence
  Synthetic
tgcacttgcttcaggaccatatttc

SEQ ID NO: 3311 - DNA, 53 bp, Artificial Sequence; identical to SEQ ID NO: 3307
  Synthetic

SEQ ID NO: 3312 - DNA, 25 bp, Artificial Sequence
  Synthetic
tgcacttgcttcaggaccatatttc

SEQ ID NO: 3313 - DNA, 50 bp, Artificial Sequence
  Synthetic
gaaattaatacgactcactatagggagcgattgatggtgatactgttaaa

SEQ ID NO: 3314 - DNA, 25 bp, Artificial Sequence
  Synthetic
tcgtaaatgcacttgcttcaggacc

SEQ ID NO: 3315 - DNA, 47 bp, Artificial Sequence
  Synthetic
gaaattaatacgactcactatagggggccagtttgaataagacaatg

SEQ ID NO: 3316 - DNA, 22 bp, Artificial Sequence
  Synthetic
ggccagtttgaataagacaatg

SEQ ID NO: 3317 - DNA, 50 bp, Artificial Sequence; identical to SEQ ID NO: 3313
  Synthetic

SEQ ID NO: 3318 - DNA, 25 bp, Artificial Sequence
  Synthetic
tcgtaaatgcacttgcttcaggacc

SEQ ID NO: 3319 - DNA, 47 bp, Artificial Sequence; identical to SEQ ID NO: 3315
  Synthetic

SEQ ID NO: 3320 - DNA, 22 bp, Artificial Sequence
  Synthetic
ggccagtttgaataagacaatg

SEQ ID NO: 3321 - DNA, 50 bp, Artificial Sequence; identical to SEQ ID NO: 3313
  Synthetic

SEQ ID NO: 3322 - DNA, 25 bp, Artificial Sequence
  Synthetic
tcgtaaatgcacttgcttcaggacc

SEQ ID NO: 3323 - DNA, 47 bp, Artificial Sequence; identical to SEQ ID NO: 3315
  Synthetic

SEQ ID NO: 3324 - DNA, 22 bp, Artificial Sequence
  Synthetic
ggccagtttgaataagacaatg

SEQ ID NO: 3325 - DNA, 47 bp, Artificial Sequence; identical to SEQ ID NO: 3315
  Synthetic

SEQ ID NO: 3326 - DNA, 22 bp, Artificial Sequence
  Synthetic
ggccagtttgaataagacaatg

SEQ ID NO: 3327 - DNA, 47 bp, Artificial Sequence; identical to SEQ ID NO: 3315
  Synthetic

SEQ ID NO: 3328 - DNA, 22 bp, Artificial Sequence
  Synthetic
ggccagtttgaataagacaatg

SEQ ID NO: 3329 - DNA, 47 bp, Artificial Sequence
  Synthetic
gaaattaatacgactcactatagggattgttacattgtacacataca

SEQ ID NO: 3330 - DNA, 22 bp, Artificial Sequence
  Synthetic
attgttacattgtacacataca

SEQ ID NO: 3331 - DNA, 47 bp, Artificial Sequence; identical to SEQ ID NO: 3329
  Synthetic

SEQ ID NO: 3332 - DNA, 22 bp, Artificial Sequence
  Synthetic
attgttacattgtacacataca

SEQ ID NO: 3333 - DNA, 47 bp, Artificial Sequence; identical to SEQ ID NO: 3315
  Synthetic

SEQ ID NO: 3334 - DNA, 22 bp, Artificial Sequence
  Synthetic
tgaaacacaagaatggaaatgt

SEQ ID NO: 3335 - DNA, 60 bp, Artificial Sequence
  Synthetic
gaaattaatacgactcactataggggatcctctagaaatatggattacttggtagaacag

SEQ ID NO: 3336 - DNA, 35 bp, Artificial Sequence
  Synthetic
gataaacacaggaaacagctatgaccatgattacg

SEQ ID NO: 3337 - DNA, 50 bp, Artificial Sequence
  Synthetic
gaaattaatacgactcactatagggtcaataaggttgacgaaaacggcac

SEQ ID NO: 3338 - DNA, 25 bp, Artificial Sequence
  Synthetic
tagaaggtgaagttgaaggaagcgg

SEQ ID NO: 3339 - DNA, 60 bp, Artificial Sequence; identical to SEQ ID NO: 3335
  Synthetic

SEQ ID NO: 3340 - DNA, 35 bp, Artificial Sequence; identical to SEQ ID NO: 3336
  Synthetic

SEQ ID NO: 3341 - DNA, 50 bp, Artificial Sequence; identical to SEQ ID NO: 3337
  Synthetic

SEQ ID NO: 3342 - DNA, 25 bp, Artificial Sequence
  Synthetic
tagaaggtgaagttgaaggaagcgg

SEQ ID NO: 3343 - DNA, 47 bp, Artificial Sequence; identical to SEQ ID NO: 3315
  Synthetic

SEQ ID NO: 3344 - DNA, 22 bp, Artificial Sequence
  Synthetic
tgaaacacaagaatggaaatgt

SEQ ID NO: 3345 - DNA, 49 bp, Artificial Sequence
  Synthetic
  misc_feature (1)..(1): reporter tab - /56-FAM/
cagaggaacgtctatctaacggttggtatcttgaatgctcagtcccttt

SEQ ID NO: 3346 - DNA, 49 bp, Artificial Sequence
  Synthetic
  misc_feature (49)..(49): Reporter tag - /3BHQ1/
aaagggactgagcattcaagataccaaccgttagatagacgttcctctg

What is claimed is:

1. A lateral flow device comprising a substrate comprising a first end and a second end,
a. the first end comprising a sample loading portion, a first region comprising a detectable ligand, two or more CRISPR effector systems, two or more detection constructs, and one or more first capture regions, each comprising a first binding agent; and
b. the substrate comprising two or more second capture regions between the first region of the first end and the second end, each second capture region comprising a different binding agent;
wherein each of the two or more CRISPR effector systems comprises a CRISPR effector protein or polynucleotide encoding a CRISPR effector protein and one or more guide sequences, each guide sequence configured to bind one or more target molecules.

2. The lateral flow device of claim 1, wherein the first end comprises two detection constructs, wherein each of the two detection constructs comprises an RNA or DNA oligonucleotide, comprising a first molecule on a first end and a second molecule on a second end.

3. The lateral flow device of claim 2, wherein the first molecule on the first end of the first detection construct is FAM and the second molecule on the second end of the first detection construct is biotin or vice versa; and the first molecule on the first end of the second detection construct is FAM and the second molecule on the second end of the second detection construct is Digoxigenin (DIG) or vice versa.

4. The lateral flow device of any of claims 1 to 3, wherein the CRISPR effector protein is an RNA-targeting effector protein, DNA-targeting effector, or both.

5. The lateral flow device of claim 4, wherein the RNA-targeting effector protein is a Class 2 Type VI Cas protein and the DNA-targeting effector protein is Class 2, Type V Cas protein.

6. The lateral flow device of claim 4, wherein the RNA-targeting effector protein is Cas13a, Cas13b, Cas13c, or Cas13d.

7. The lateral flow device of claim 1, wherein the first end comprises three detection constructs, wherein each of the three detection constructs comprises an RNA or DNA oligonucleotide, comprising a first molecule on a first end and a second molecule on a second end.

8. The lateral flow device of claim 7, wherein the first and second molecules on the detection constructs comprise Tye 665 and Alexa 488; Tye 665 and FAM; and Tye 665 and Digoxigenin (DIG).

9. The lateral flow device of claim 1, wherein a polynucleotide encoding a CRISPR effector protein and the one or more guide RNAs are provided as a multiplexing polynucleotide, the multiplexing polynucleotide configured to comprise two or more guide sequences.

10. A method for detecting a target nucleic acid in a sample, comprising contacting a sample with the first end of the lateral flow device of claim 1 comprising the sample loading portion, wherein the sample flows from the sample loading portion of the substrate towards the first and second capture regions and generates a detectable signal.

11. The method of claim 10, wherein the lateral flow device is capable of detecting two different target nucleic acid sequences.

12. The method of claim 10 or 11, wherein when the target nucleic acid sequences are absent from the sample, a fluorescent signal is generated at each capture region.

13. The method of claim 11, wherein the detectable signal appears at the first and second capture regions.

14. The method of claim 10, wherein the lateral flow device is capable of detecting three different target nucleic acid sequences.

15. The method of claim 14, wherein when the target nucleic acid sequences are absent from the sample, a fluorescent signal is generated at each capture region.

16. The method of claim 15, wherein the fluorescent signal appears at the first, second, and third capture regions.

17. The method of claim 13, wherein when the sample contains one or more target nucleic acid sequences, a fluorescent signal is absent at the capture region for the corresponding target nucleic acid sequence.

18. A nucleic acid detection system comprising two or more CRISPR systems, each CRISPR system comprising an effector protein and a guide RNA designed to bind to a corresponding target molecule; a set of detection constructs, each detection construct comprising a cutting motif sequence that is preferentially cut by one of the activated CRISPR effector proteins; and reagents for helicase dependent nucleic acid amplification (HDA).

19. A method for quantifying target nucleic acids in samples comprising distributing a sample or set of samples into one or more individual discrete volumes comprising two or more CRISPR systems according to claim 18,
amplifying one or more target molecules in the sample or set of samples by HDA;
incubating the sample or set of samples under conditions sufficient to allow binding
of the guide RNAs to one or more target molecules;
activating the CRISPR effector protein via binding of the guide RNAs to the one or more target molecules, wherein activating the CRISPR effector protein results in modification of the detection construct such that a detectable positive signal is generated;
detecting the one or more detectable positive signal, wherein detection of the one or more detectable positive signal indicates a presence of one or more target molecules in the sample; and
comparing the intensity of the one or more signals to a control to quantify the nucleic acid in the sample;
wherein the steps of amplifying, incubating, activating, and detecting are all performed in the same individual discrete volume.

20. The method of claim 19, wherein the detectable positive signal is a loss of fluorescent signal.

21. The method of claim 19, wherein the detectable positive signal is detected on a lateral flow device.

22. The method of claim 19, wherein the HDA reagents comprise a helicase super mutant, selected from WP_003870487.1 Thermoanaerobacter ethanolicus comprising mutations D403A/D404, WP_049660019.1 Bacillus sp. FJAT-27231 comprising mutations D407A/D408A, WP_034654680.1 Bacillus megaterium comprising mutations D415A/D416A, WP_095390358.1, Bacillus simplex comprising mutations D407A/D408A, and WP_055343022.1 Paeniclostridium sordellii comprising mutations D402A/D403A.

23. A method for designing guide RNAs for use in the detection systems of the preceding claims, the method comprising:
a. designing putative guide RNAs tiled across a target molecule of interest;
b. incubating putative guide RNAs with a Cas effector protein and the target molecule and measuring cleavage activity of the each putative guide RNA
c. creating a training model based on the cleavage activity results of incubating the putative guide RNAs with the Cas effector protein and the target molecule;
d. predicting highly active guide RNAs for the target molecule, wherein the predicting comprises optimizing the nucleotide at each base position in the guide RNA based on the training model; and
e. validating the predicted highly active guide RNAs by incubating the guide RNAs with the Cas effector protein and the target molecule.

24. The method of claim 23, wherein the Cas effector protein is a Cas12 or Cas13 protein.

25. The method of claim 24, wherein the Cas protein is a Cas13a or Cas13b protein.

26. The method of claim 25, wherein the Cas protein is LwaCas13a or CcaCas13b.

27. The method of claim 23, wherein the training model comprises one or more input features selected from guide sequence, flanking target sequence, normalized positions of the guide in the target and guide GC content.

28. The method of claim 26, wherein the guide sequence and/or flanking sequence input comprises one hit encoding mono-nucleotide and/or dinucleotide based identities across a guide length and flanking sequence in the target.

29. The method of claim 27, wherein the training model comprises applying logistic regression model on the activity of the guides across the one or more input features.

30. The method of claim 23, wherein the predicting highly active guides for the target molecule comprises selecting guides with an increase in activity of a guide relative to the median activity, or selecting guides with highest guide activity.

31. The method of claim 30, wherein the increase in activity is measured by an increase in fluorescence.

32. The method of claim 29, wherein the guides are selected with a 1.5, 2, 2.5 or 3-fold activity relative to median, or are in the top quartile or quintile for each target tested.
